(19) United States
(12) Patent Application Publication
(10) Pub. No.: US 2026/0201375 A1
(43) Pub. Date: Jul. 16, 2026

(54) MODIFIED OLIGONUCLEOTIDES

(71) Applicant: Eli Lilly and Company, Indianapolis, IN (US)

(72) Inventors: Jibo Wang, Indianapolis, IN (US); Rebecca Ruth Miles, Indianapolis, IN (US); Lacie Marie Chauvigne-Hines, Indianapolis, IN (US); Suntara Cahya, Indianapolis, IN (US); Isabel C. Gonzalez Valcarcel, Indianapolis, IN (US)

(73) Assignee: Eli Lilly and Company, Indianapolis, IN (US)

(21) Appl. No.: 19/135,569

(22) PCT Filed: Dec. 4, 2023
(86) PCT No.: PCT/US2023/082237

§ 371 Date: Jun. 4, 2025

Related U.S. Application Data
(60) Provisional application No. 63/386,153, filed on Dec. 5, 2022.

(51) Int. Cl. C12N 15/113; A61K 31/712; A61K 31/7125; A61K 31/713

(52) U.S. Cl. CPC C12N 15/113; A61K 31/712; A61K 31/7125; A61K 31/713; C12N 2310/14; C12N 2310/312; C12N 2310/315; C12N 2310/321; C12N 2310/322; C12N 2310/344; C12N 2310/346; C12N 2310/3533

(57) ABSTRACT

Aspects of the disclosure relate to compositions and methods for modulating levels, function, and/or activity one or more RNA transcripts (e.g., mRNA transcripts) or the proteins in a cell or subject. The disclosure is based, in part, on chemically modified inhibitory nucleic acids that are capable of target RNA knockdown with high specificity and low off-target effects.

### RELATED APPLICATIONS

[0001] This application is a national stage filing under 35 U.S.C. § 371 of international PCT application PCT/US2023/082237, filed Dec. 4, 2023, which claims priority under 35 U.S.C. § 119(e) to U.S. provisional patent application, U.S. Ser. No. 63/386,153, filed Dec. 5, 2022, the entire contents of each of which are incorporated by reference herein.

### REFERENCE TO AN ELECTRONIC SEQUENCE LISTING

[0002] The contents of the electronic sequence listing (E058570012US01-SEQ-KZM.xml; Size: 2,820,627 bytes; and Date of Creation: Apr. 25, 2025) are herein incorporated by reference in its entirety.

### BACKGROUND

[0003] Targeted knockdown of proteins may be achieved by targeting mRNA with inhibitory nucleic acids. Chemically modified nucleic acids provide unique functional properties which enable specific targeting of mRNAs. Therapeutics comprising chemically modified oligonucleotides associated with low frequency off target knockdown effects are clinically relevant.

### SUMMARY

[0004] Aspects of the disclosure relate to chemically modified nucleic acids that bind to mRNA transcripts of target genes. In some embodiments, compositions of the disclosure are useful for treating diseases or disorders associated with dysregulated expression of mRNA and/or the protein products they encode. The disclosure is based, in part, on compositions and methods for modulating the function, activity, and/or level the protein product encoded by the target mRNA by decreasing target mRNA level and/or translation of that target mRNA in a cell or subject.

[0005] Accordingly, in some aspects, the disclosure provides a double stranded nucleic acid comprising a sense strand; and an antisense strand having a 5′-end and a 3′-end, and consisting of modified nucleotides, wherein the modified nucleotides do not comprise more than five 2′-fluoro (2′F)-modified nucleotides, and wherein the 2′F-modified nucleotides are located at positions 2, 5, 7, 14, and 16 relative to the 5′-end of the antisense strand.

[0006] In some aspects, the disclosure provides a double stranded nucleic acid comprising a sense strand; and an antisense strand having a 5′-end and a 3′-end, and consisting of modified nucleotides, wherein the modified nucleotides do not comprise more than five 2′F-modified nucleotides, and wherein the 2′F-modified nucleotides are located at positions 2, 3, 7, 14, and 16 relative to the 5′-end of the antisense strand.

[0007] In some aspects, the disclosure provides a double stranded nucleic acid comprising a sense strand; and an antisense strand having a 5′-end and a 3′-end, and consisting of modified nucleotides, wherein the modified nucleotides do not comprise more than five 2′F-modified nucleotides, and wherein the 2′F-modified nucleotides are located at positions 2, 5, 8, 14, and 16 relative to the 5′-end of the antisense strand.

[0008] In some aspects, the disclosure provides a double stranded nucleic acid comprising a sense strand; and an antisense strand having a 5′-end and a 3′-end, and consisting of modified nucleotides, wherein the modified nucleotides do not comprise more than six 2′F-modified nucleotides, and wherein the 2′F-modified nucleotides are located at positions 2, 4, 6, 8, 14, and 16 relative to the 5′-end of the antisense strand.

[0009] In some aspects, the disclosure provides a double stranded nucleic acid comprising a sense strand; and an antisense strand having a 5′-end and a 3′-end, and consisting of modified nucleotides, wherein the modified nucleotides do not comprise more than five 2′F-modified nucleotides, and wherein the 2′F-modified nucleotides are located at positions 2, 6, 8, 14, and 16 relative to the 5′-end of the antisense strand.

[0010] In some embodiments, a sense strand comprises a 5′-end and a 3′-end, and comprises 2′F-modified nucleotides at positions 9, 10, and 11 relative to the 5′-end of the sense strand; positions 7, 9, and 11 relative to the 5′-end of the sense strand; positions 7, 9, and 10 relative to the 5′-end of the sense strand; or positions 7, 10, and 11 relative to the 5′-end of the sense strand. In some embodiments, a sense strand does not comprise any other 2′F-modified nucleotides.

[0011] In some aspects, the disclosure provides a double stranded nucleic acid comprising a sense strand and an antisense strand, wherein the sense strand and the antisense strand form a duplex, wherein the antisense strand comprises a sequence complementary to a portion of a target mRNA, and wherein the antisense strand comprises five 2′F-modified nucleotides at one of the following set of positions from the 5′ end of the antisense strand: (a) positions 2, 5, 7, 14, and 16; (b) positions 2, 3, 7, 14, and 16; (c) positions 2, 5, 8, 14, and 16, and no other 2′F-modified nucleotides.

[0012] In some embodiments, a sense strand comprises three 2′F-modified nucleotides at one of the following set of positions from the 5′ end of the sense strand: (a) positions 9, 10, and 11; (b) positions 7, 9, and 11; (c) positions 7, 9, 10; or (d) positions 7, 10, and 11.

[0013] In some embodiments, an antisense strand comprises 2′-O-methyl modified nucleotides at positions other than 2′F-modified positions.

[0014] In some embodiments, a sense strand comprises 2′-O-methyl modified nucleotides or 2′-O-alkyl modified nucleotides (e.g., 2′-O—C₁₂₋₁₆ alkyl modified nucleotides) at positions other than 2′F-modified positions. In some embodiments, a sense strand comprises one or more abasic moieties at positions other than 2′F-modified positions.

[0015] In some embodiments, position 1 relative to the 5′-end of a sense strand or 5′-end of an antisense strand comprises a 5′ phosphate analog. In some embodiments, a 5′ phosphate analog comprises a 5′ vinyl phosphonate group. In some embodiments, an antisense strand comprises a 5′ phosphate analog.

[0016] In some embodiments, a sense strand is between 18 and 24 nucleotides in length. In some embodiments, a sense strand is 21 nucleotides in length.

[0017] In some embodiments, an antisense strand is between 18 and 24 nucleotides in length. In some embodiments, an antisense strand is 23 nucleotides in length.

[0018] In some embodiments, a sense strand and an antisense strand do not have the same length. In some embodiments, an antisense strand is longer than a sense strand. In some embodiments, an antisense strand is between 2 and 10 nucleotides longer than a sense strand.

[0019] In some embodiments, modified nucleotides are modified ribonucleotides. In some embodiments, modified nucleotides of a sense strand comprise one or more 2′-O-methyl (2′OMe)-modified nucleotides or one or more 2′-O-alkyl modified nucleotides (e.g., 2′-O—C₁₂₋₁₆ alkyl modified nucleotides).

[0020] In some embodiments, a double stranded nucleic acid comprises one or more abasic moieties.

[0021] In some embodiments, modified nucleotides of a sense strand comprise only 2′OMe-modified nucleotides with the exception of 2′F-modified nucleotides at listed positions.

[0022] In some embodiments, modified nucleotides of a sense strand comprise one or more 2′-O-methyl (2′OMe)-modified nucleotides, one or more 2′-O-alkyl modified nucleotides (e.g., 2′-O—C₁₂₋₁₆ alkyl modified nucleotides), or one or more abasic moieties.

[0023] In some embodiments, modified nucleotides of an antisense strand comprise only 2′OMe-modified nucleotides with the exception of 2′F-modified nucleotides at listed positions.

[0024] In some embodiments, a sense strand comprises one or more modified internucleotide linkages. In some embodiments, a sense strand comprises four modified internucleotide linkages. In some embodiments, modified internucleotide linkages comprise one or more phosphorothioate (PS) internucleotide linkages. In some embodiments, each modified internucleotide linkage of a double stranded nucleic acid sense strand is a PS internucleotide linkage.

[0025] In some embodiments, an antisense strand comprises one or more modified internucleotide linkages. In some embodiments, an antisense strand comprises four modified internucleotide linkages. In some embodiments, modified internucleotide linkages comprise one or more phosphorothioate (PS) internucleotide linkages. In some embodiments, each modified internucleotide linkage of a double stranded nucleic acid antisense strand is a PS internucleotide linkage.

[0026] In some embodiments, positions 1 and 2 (e.g., relative to the 5′ end) of a sense strand are linked by a modified internucleotide linkage. In some embodiments, positions 2 and 3 (e.g., relative to the 5′ end) of a sense strand are linked by a modified internucleotide linkage. In some embodiments, positions 1, 2, 3, and 4 (e.g., relative to the 5′ end) of a sense strand are linked by a modified internucleotide linkage. In some embodiments, the modified internucleotide linkage is a phosphorothioate (PS) internucleotide linkage.

[0027] In some embodiments, positions 1 and 2 (e.g., relative to the 5′ end) of an antisense strand are linked by a modified internucleotide linkage. In some embodiments, positions 2 and 3 (e.g., relative to the 5′ end) of an antisense strand are linked by a modified internucleotide linkage. In some embodiments, positions 1, 2, 3, and 4 (e.g., relative to the 5′ end) of an antisense strand are linked by a modified internucleotide linkage. In some embodiments, the modified internucleotide linkage is a phosphorothioate (PS) internucleotide linkage.

[0028] In some embodiments, at least two of positions 1, 2, and 3 of the 3′ end of the sense strand are linked by a modified internucleotide linkage, optionally a phosphorothioate (PS) internucleotide linkage.

[0029] In some embodiments, at least two of positions 1, 2, and 3 of the 3′ end of the antisense strand are linked by a modified internucleotide linkage, optionally a phosphorothioate (PS) internucleotide linkage.

[0030] In some embodiments, each of positions 1, 2, and 3 relative to the 3′ end of the sense strand are linked by a modified internucleotide linkage, optionally a phosphorothioate (PS) internucleotide linkage.

[0031] In some embodiments, each of positions 1, 2, and 3 relative to the 3′ end of the antisense strand are linked by a modified internucleotide linkage, optionally a phosphorothioate (PS) internucleotide linkage.

[0032] In some aspects, the disclosure provides a double stranded nucleic acid comprising a sense strand and/or antisense strand comprising the nucleotide sequence set forth in any one of SEQ ID NOs: 1-199 (e.g., as listed in Tables 1-5). In some aspects, the disclosure provides a double stranded nucleic acid comprising a sense strand and/or antisense strand comprising the nucleotide sequence and modification pattern set forth in any one of SEQ ID NOs: 1-199 (e.g., as listed in Tables 1-5). In some aspects, the disclosure provides a double stranded nucleic acid comprising a sense strand and an antisense strand comprising a SEQ ID NO selected from any one of Tables 1-5 (e.g., a sense strand comprising any one of SEQ ID NOs: 1, 2, 3, 4, 9, 10, 11, 12, 13, 14, 15, 16, 17, 18, 19, 20, 21, 22, 23, 24, 25, 26, 27, 28, 29, 30, 31, 32, 33, 34, 35, 36, 37, 38, 39, 40, 41, 42, 77, 79, 80, 81, 82, 83, 84, 85, 86, 87, 88, 89, 90, 91, 92, 93, 94, 95, 96, 97, 98, 99, 100, 101, 102, 103, 104, 105, 106, 107, 108, 109, 110, 111, 145, 146, 152, 153, 154, 155, 156, 157, 158, 159, 160, 161, 162, 163, 164, 165, 166, 167, 168, 169, 170, 171, 172, 173, 174, or 175 and an antisense strand comprising any one of SEQ ID NOs: 5, 6, 7, 8, 43, 44, 45, 46, 47, 48, 49, 50, 51, 52, 53, 54, 55, 56, 57, 58, 59, 60, 61, 62, 63, 64, 65, 66, 67, 68, 69, 70, 71, 72, 73, 74, 75, 76, 78, 112, 113, 114, 115, 116, 117, 118, 119, 120, 121, 122, 123, 124, 125, 126, 127, 128, 129, 130, 131, 132, 133, 134, 135, 136, 137, 138, 139, 140, 141, 142, 143, 144, 147, 148, 149, 150, 151, 176, 177, 178, 179, 180, 181, 182, 183, 184, 185, 186, 187, 188, 189, 190, 191, 192, 193, 194, 195, 196, 197, 198, or 199). In some embodiments, the double stranded nucleic acid comprises a region of complementarity with a human alpha synuclein (SNCA) mRNA transcript. In some embodiments, the double stranded nucleic acid comprises a region of complementarity with a human apolipoprotein E (APOE) mRNA transcript.

[0033] In some aspects, the disclosure provides a conjugate comprising a double stranded nucleic acid as described herein.

[0034] In some embodiments, a conjugate comprises a structure of Formula I, wherein Formula I comprises:

[chemical structure]

wherein “A” of Formula I comprises a double-stranded nucleic acid as described herein, “B” of Formula I comprises a bond or a linker, and “C” of Formula I comprises a delivery molecule.

[0035] In some embodiments, “B” of Formula I is connected to the 5′ end or the 3′ end of the sense strand of the double stranded nucleic acid. In some embodiments, “B” of Formula I is connected to the 3′ end of the sense strand of the double stranded nucleic acid. In some embodiments, “B” of Formula I is connected to the 5′ end or the 3′ end of the antisense strand of the double stranded nucleic acid. In some embodiments, “B” of Formula I comprises a triethylene glycol (TEG) linker. In some embodiments, “B” of Formula I comprises a linker comprising a C₆—NH₂ group. In some embodiments, “B” of Formula I does not comprise: a maleimide-methyl-tetrazine-trans-cyclo-octene (mal-tet-TCO) linker; a succinimidyl-4-(N-maleimidomethyl)cyclohexane-1-carboxylate (SMCC) linker; a linker comprising a tertiary amide which is bonded to a gem-dimethyl (GDM) group; or a linker comprising a C₆—NH₂ group.

[0036] In some embodiments, “C” of Formula I comprises one or more N-acetylgalactosamine (GalNAc) moieties. In some embodiments, “C” of Formula I comprises cholesterol. In some embodiments, “C” of Formula I comprises tocopherol.

[0037] In some embodiments, a double stranded RNA described by the disclosure does not comprise a nucleotide which is connected to: a maleimide group; a tertiary amide which is bonded to a gem-dimethyl (GDM) group; or a C₆—NH₂ group.

[0038] In some aspects, the disclosure provides a pharmaceutical composition comprising the double stranded nucleic acid as described herein, or the conjugate as described herein, and a pharmaceutically acceptable carrier.

[0039] In some aspects, the disclosure provides a method of inhibiting or reducing a target mRNA in a cell, the method comprising contacting the cell comprising the target mRNA with a double stranded nucleic acid, conjugate, or pharmaceutical composition as described herein.

[0040] In some embodiments, a cell is a mammalian cell. In some embodiments, a cell is a human cell. In some embodiments, a cell is in a subject. In some embodiments a subject is a human subject.

### DETAILED DESCRIPTION

[0041] Aspects of the disclosure relate to compositions and methods for modulating a level and/or translation of one or more RNA transcripts (e.g., mRNA transcripts) in a cell or subject. The disclosure is based, in part, on chemically modified double stranded inhibitory nucleic acids having certain patterns of 2′ Fluoro (2′F) modifications that bind to target mRNA transcripts, alter the target mRNA transcript level, and alter the activity and/or level of proteins expressed by the target mRNA transcripts. In some embodiments, the disclosure provides double stranded nucleic acids having an antisense strand comprising 2′F-modified nucleotides at the following positions relative to the 5′-end of the antisense strand: 2, 5, 7, 14, and 16; 2, 3, 7, 14, and 16; 2, 5, 8, 14, and 16; 2, 4, 6, 8, 14, and 16, or 2, 6, 8, 14, and 16. In some embodiments, the antisense strand does not comprise any other 2′F-modified nucleotides. In some embodiments, double stranded nucleic acids described herein are more durable in vivo, maintain potency, and/or have fewer off-target effects than double stranded nucleic acids that are unmodified, or have different patterns of chemical modifications.

[0042] In some embodiments, double stranded nucleic acids described by the disclosure are not conjugated to any other moiety (e.g., a delivery molecule). However, some aspects of the disclosure relate to conjugates comprising double stranded nucleic acids described herein and one or more delivery molecules.

[0043] In some embodiments, compositions of the disclosure are useful for inhibiting expression or activity of a target mRNA, and/or treating diseases or disorders associated with altered expression of specific disease-associated target mRNAs and/or proteins.

### Double Stranded Nucleic Acids

[0044] Aspects of the disclosure relate to double stranded nucleic acids. Nucleic acids comprise two or more nucleotides. As used herein, “nucleotide” means an organic compound having a nucleoside (a nucleobase, e.g., adenine, cytosine, guanine, thymine, or uracil, and a pentose sugar, e.g., ribose or 2′-deoxyribose) linked to a phosphate group. A “nucleotide” can serve as a monomeric unit of nucleic acid polymers (e.g., oligonucleotides) such as deoxyribonucleic acid (DNA) and ribonucleic acid (RNA). In some embodiments, a nucleic acid is an oligonucleotide. As used herein, “oligonucleotide” means a polymer of linked nucleotides (including abasic moieties), each of which can be modified or unmodified. An oligonucleotide is typically less than about 100 nucleotides in length. Oligonucleotides may comprise unmodified DNA nucleotides, chemically modified DNA nucleotides, unmodified RNA nucleotides, chemically-modified RNA nucleotide, unnatural nucleotides (e.g., non-naturally occurring nucleotides), abasic moieties, or any combination thereof.

[0045] A double stranded nucleic acid typically forms a duplex. As used herein, a “duplex,” refers to a structure formed through complementary base pairing of two antiparallel sequences of nucleotides (i.e., in opposite directions), whether formed by two separate nucleic acid strands or by a single, folded strand (e.g., via a hairpin). As used herein, “strand” refers to a single, contiguous sequence of nucleotides linked together through internucleotide linkages (e.g., phosphodiester linkages or phosphorothioate linkages). A strand can have two free ends (e.g., a 5′ end and a 3′ end). In some embodiments, double stranded nucleic acids described herein form a duplex comprising a sense strand and an antisense strand. Sense strands and antisense strands of nucleotides are herein described further in the section entitled “Sense and Antisense Strands.”

[0046] The length of each strand of a double stranded nucleic acid may vary. In some embodiments, each strand of a double stranded nucleic acid ranges from about 10 nucleotides in length to about 50 nucleotides in length (e.g., 10, 11, 12, 13, 14, 15, 16, 17, 18, 19, 20, 21, 22, 23, 24, 25, 26, 27, 28, 29, 30, 31, 32, 33, 34, 35, 36, 37, 38, 39, 40, 41, 42, 43, 44, 45, 46, 47, 48, 49, or 50 nucleotides in length). In some embodiments, each strand of a double stranded nucleic acid ranges from about 18 to 24 nucleotides in length. In some embodiments, a sense strand comprises or consists of 21 nucleotides. In some embodiments, an antisense strand comprises or consists of 23 nucleotides. It should be appreciated that although the foregoing numeric ranges refer to “nucleotides”, the disclosure also contemplates abasic moieties to be included in such ranges.

[0047] In some embodiments, the sense strand and antisense strand of a double stranded nucleic acid are the same length (e.g., the double stranded nucleic acid is “blunt-ended”). In some embodiments, the sense strand is longer than the antisense strand. In some embodiments, the antisense strand is longer than the sense strand. In some embodiments, the sense strand and antisense strand are of different lengths, and the double stranded nucleic acid comprises one or two overhangs. As used herein, “overhang” means the unpaired nucleotide or nucleotides that protrude from the duplex structure of a double stranded oligonucleotide. An overhang may include one or more unpaired nucleotides extending from a duplex region at the 5′ terminus or 3′ terminus of a double stranded oligonucleotide. The overhang can be a 3′ or 5′ overhang on the antisense strand or sense strand of a double stranded oligonucleotide. In some embodiments, the sense strand is longer than the antisense strand by 1-10 nucleotides (e.g., 1, 2, 3, 4, 5, 6, 7, 8, 9, or 10 nucleotides). In some embodiments, the antisense strand is longer than the sense strand by 1-10 nucleotides (e.g., 1, 2, 3, 4, 5, 6, 7, 8, 9, or 10 nucleotides). In some embodiments, a double stranded nucleic acid comprises one overhang on the sense strand (e.g., a 5′ sequence on the sense strand that extends past the 5′-most nucleotide of the antisense strand). In some embodiments, a double stranded nucleic acid comprises one overhang on the antisense strand (e.g., a 5′ sequence on the antisense strand that extends past the 5′-most nucleotide of the sense strand). In some embodiments, a double stranded nucleic acid comprises two overhangs on the sense strand. In some embodiments, a double stranded nucleic acid comprises two overhangs on the antisense strand. In some embodiments, a double stranded nucleic acid comprises one overhang on the sense strand and one overhang on the antisense strand. In some embodiments, an overhang sequence is about 2, 3, 4, 5, 6, 7, 8, 9 or 10 nucleotides in length.

[0048] In some embodiments, a double stranded nucleic acid is an inhibitory nucleic acid. As used herein, an “inhibitory nucleic acid” refers to an oligonucleotide capable of decreasing the level, function, and/or activity of an mRNA transcript (e.g., a target mRNA transcript) or the protein encoded by the mRNA inside of a cell. As used herein, a “target mRNA” is an mRNA encoding a protein associated with a disease or disorder, including but not limited to mRNAs encoding mutant proteins, pathogenic protein isoforms, or mRNAs that are not normally expressed in healthy cells. In some embodiments, a target mRNA is a wild-type mRNA (e.g., an mRNA encoding a wild-type protein). In some embodiments, inhibitory nucleic acids may be used to cleave target mRNA or inhibit translation of a target mRNA that comprises one or more mutations (e.g., substitutions, deletions, and/or insertions) relative to the wild-type version of the sequence found in nature. In some embodiments, inhibitory nucleic acids may be used to inhibit translation of a target mRNA that code for shortened versions of genes that are commonly found in nature (e.g., truncation mutants or mutants lacking catalytic and/or regulatory domains).

[0049] In some embodiments, the antisense strand of a double stranded nucleic acid hybridizes with a target mRNA molecule. Hybridization of nucleic acids typically comprises binding of one nucleic acid strand to a complementary region on another nucleic acid strand. The terms “bind” and “binds” as used herein are intended to mean, unless indicated otherwise, the ability of a molecule to form a chemical bond or attractive interaction with another molecule, which results in proximity of the two molecules as determined by common methods known in the art. As used herein, “complementary” means a structural relationship between two nucleotides (e.g., on two opposing nucleic acids or on opposing regions of a single nucleic acid strand, e.g., a hairpin) that permits the two nucleotides to form base pairs with one another. For example, a purine nucleotide of one nucleic acid that is complementary to a pyrimidine nucleotide of an opposing nucleic acid may base pair together by forming hydrogen bonds with one another. Complementary nucleotides can base pair in the Watson-Crick manner or in any other manner that allows for the formation of stable duplexes. Likewise, two nucleic acids may have regions of multiple nucleotides that are complementary with each other to form regions of complementarity, as described herein.

[0050] In some embodiments, a target mRNA comprises a degree of sequence identity relative to the sense strand that is sufficient to promote specific binding (e.g., hybridization) by the antisense strand of a double stranded nucleic acid (e.g., an inhibitory nucleic acid). The term “% sequence identity” or “percentage sequence identity” with respect to a reference nucleic acid sequence is defined as the percentage of nucleotides, nucleosides, or nucleobases in a candidate sequence that are identical with the nucleotides, nucleosides, or nucleobases in the reference nucleic acid sequence, after optimally aligning the sequences and introducing gaps or overhangs, if necessary, to achieve the maximum percent sequence identity. Alignment for purposes of determining percent nucleic acid sequence identity can be achieved in various ways that are within the skill in the art, for instance, using publicly available computer software programs, for example, those described in Current Protocols in Molecular Biology (Ausubel et al., eds., 1987, Supp. 30, section 7.7.18, Table 7.7.1), and including BLAST, BLAST-2, ALIGN, Megalign (DNASTAR), Clustal W2.0 or Clustal X2.0 software. Those skilled in the art can determine appropriate parameters for measuring alignment, including any algorithms needed to achieve maximal alignment over the full length of the sequences being compared. Percentage of “sequence identity” can be determined by comparing two optimally aligned sequences over a comparison window, where the fragment of the nucleic acid sequence in the comparison window may comprise additions or deletions (e.g., gaps or overhangs) as compared to the reference sequence (which does not comprise additions or deletions) for optimal alignment of the two sequences. The percentage can be calculated by determining the number of positions at which the identical nucleotide, nucleoside, or nucleobase occurs in both sequences to yield the number of matched positions, dividing the number of matched positions by the total number of positions in the window of comparison, and multiplying the result by 100 to yield the percentage of sequence identity. The output is the percent identity of the subject sequence with respect to the query sequence.

[0051] In some embodiments, a strand of a double stranded nucleic acid (e.g., sense strand) comprises between about 80% and 100% (e.g., about 80%, 85%, 90%, 95%, 99%, 99.9%, or 100%) sequence identity with a target mRNA. In some embodiments, a strand of a double stranded nucleic acid (e.g., sense strand) has 80%, 81%, 82%, 83%, 84%, 85%, 86%, 87%, 88%, 89%, 90%, 91%, 92%, 93%, 94%, 95%, 96%, 97%, 98%, 99%, or 100% sequence identity with a target mRNA. In some embodiments, an inhibitory nucleic acid comprises an antisense strand comprising a region of complementarity that is at least 80% complementary to a portion of a target mRNA (e.g., 80%, 81%, 82%, 83%, 84%, 85%, 86%, 87%, 88%, 89%, 90%, 91%, 92%, 93%, 94%, 95%, 96%, 97%, 98%, 99%, or 100% of the nucleotides of the antisense strand hybridize to the ribonucleotides of the target mRNA). In some embodiments, an inhibitory nucleic acid comprises an antisense strand comprising a region of complementarity that is perfectly complementary to a portion of a target mRNA (e.g., 100% of the nucleotides of the antisense strand hybridize to the ribonucleotides of the target mRNA).

[0052] In some embodiments, a double stranded inhibitory nucleic acid comprises a single oligonucleotide comprising sense and antisense strands linked by a linker, a hairpin loop, and/or a common backbone which intramolecularly hybridizes via nucleotides in the sense and antisense strands. Such a double stranded inhibitory nucleic acid would comprise a single 5′ and 3′ end and a loop region located between the two sense and antisense sequences that do not form base pairs with any other nucleotides within the inhibitory nucleic acid. In some embodiments, a double stranded inhibitory nucleic acid comprises two complementary oligonucleotides having respective 5′ and 3′ ends and respective backbones. In some embodiments, inhibitory nucleic acids are double stranded RNAs (dsRNAs). In some embodiments, inhibitory nucleic acids that are dsRNAs function like RNA interference (RNAi) molecules and thus may be referred to as RNAi agents. In some embodiments, inhibitory nucleic acids that are dsRNAs function like small interfering RNA molecules and thus may be referred to as siRNAs. The term “knockdown” or “expression knockdown” refers to reduced mRNA or protein expression of a gene after treatment with an inhibitory nucleic acid (e.g., RNAi agent).

[0053] In some embodiments, the double stranded nucleic acid is a RNAi agent. As used herein, “RNAi agent”, “iRNA,” “iRNA agent,” “RNAi,” and “RNA interference agent” means an agent that contains ribonucleotides or RNA and mediates the targeted cleavage of a RNA transcript via RNA interference, e.g., through a RNA-induced silencing complex (RISC) pathway. In some embodiments, the RNAi agent comprises a sense strand and an antisense strand, and the sense strand and the antisense strand form a duplex. In some embodiments, the sense strand and antisense strand of the RNAi agent are 21-23 nucleotides in length.

[0054] To provide desirable characteristics, for example to minimize the likelihood of off-target effects, to increase potency, and/or to increase durability, a double stranded nucleic acid may be designed to ensure that it does not have a sequence (e.g., of 5 or more consecutive nucleotides) that is complementary with an off-target nucleic acid (e.g., an mRNA that does not comprise the sequence of the target mRNA), or engineered to comprise one or more modified nucleotides that reduce or prevent off-target interactions or degradation (e.g., enzymatic cleavage). Aspects of the disclosure relate to double stranded nucleic acids having certain patterns of 2′F-modifications that reduce promiscuity (e.g., off-target binding) of the nucleic acids relative to double stranded nucleic acids not having modifications or not having the same patterns of 2′F-modifications described herein.

[0055] Aspects of the disclosure relate to double stranded nucleic acids comprising certain patterns of chemical modifications (e.g., modified nucleotides, abasic moieties, modified internucleotide linkages, etc.). As used herein, “modified nucleotide” refers to a nucleotide having one or more chemical modifications when compared with a corresponding reference nucleotide selected from: adenine ribonucleotide, guanine ribonucleotide, cytosine ribonucleotide, uracil ribonucleotide, adenine deoxyribonucleotide, guanine deoxyribonucleotide, cytosine deoxyribonucleotide, and thymidine deoxyribonucleotide.

[0056] Chemical modifications may be used to endow a double stranded nucleic acid with specific functional characteristics not exhibited by unmodified nucleic acids. Double stranded nucleic acids of the disclosure may be modified to achieve one or more desired properties, such as, for example, improved cellular uptake, improved stability, reduced immunogenicity, improved potency, improved target hybridization, susceptibility to RNAse cleavage, etc. In some embodiments, an inhibitory nucleic acid is modified such that when present in a cell that contains an mRNA target, it is capable of hybridizing with the mRNA transcribed from the DNA sequence and inducing cleavage of the mRNA.

[0057] A modified nucleotide can have, for example, one or more chemical modifications in its sugar, nucleobase, and/or phosphate group. Additionally, or alternatively, a modified nucleotide can have one or more chemical moieties conjugated to a corresponding reference nucleotide. In some embodiments, the modified nucleotide is a 2′-fluoro modified nucleotide, 2′-O-methyl modified nucleotide, or 2′-O-alkyl modified nucleotide, e.g., a 2′O—C₁₂₋₁₆ alkyl modified nucleotide. As used herein, the term “alkyl” means saturated linear or branched-chain monovalent hydrocarbon radical, containing the indicated number of carbon atoms. For example, “C₁₂₋₁₆ alkyl” means a radical having 12-16 carbon atoms in a linear or branched arrangement. Additional examples of nucleotides comprising modifications to a 2′ carbon of the sugar group include but are not limited to D-ribose, 2′-deoxy, 2′-O-alkyl (including 2′-O-methyl and 2′-O-ethyl), 2′-alkoxy, 2′-amino, 2′-aminoalkoxy, 2′-S-alkyl, 2′-2-O-methoxyethoxy, 2′-O-methoxyethyl, 2′-allyloxy (OCH2CH═CH2), 2′-propargyl, 2′-propyl, ethynyl, ethenyl, propenyl, and cyano and the like. In some embodiments, the 2′-modified nucleotide comprises a 2′-O-4′-C methylene bridge, such as a locked inhibitory nucleic acid (LNA) nucleotide. In some embodiments, the 2′-hydroxyl group is linked to the 3′ or 4′ carbon atom of the sugar ring thereby forming a bicyclic sugar moiety. Other 2′ modifications are found in the art.

[0058] In some embodiments, the modified nucleotide has a phosphate analog. As used herein, “phosphate analog” means a chemical moiety that mimics the electrostatic and/or steric properties of a phosphate group. In some embodiments, a phosphate analog is positioned at the 5′ terminal nucleotide of an oligonucleotide in place of a 5′-phosphate, which is often susceptible to enzymatic removal. A 5′ phosphate analog can include a phosphatase-resistant linkage. Examples of phosphate analogs include 5′ methylene phosphonate (5′-MP) and 5′-(E)-vinyl phosphonate (5′-VP). In some embodiments, a phosphate analog is positioned at position 1 relative to the sense strand or the antisense strand of a double stranded RNA. In some embodiments, the phosphate analog is 5′-VP. In some embodiments, the antisense strand comprises the 5′ phosphate analog.

[0059] A double stranded nucleic acid may comprise one or more abasic moieties or inverted abasic moieties. As used herein, “abasic moiety” or “apurinic/apyrimidic site” refers to a molecule derived from a nucleotide which comprises a ribose (or deoxyribose) sugar and phosphate bond from which a nitrogenous base (e.g., nucleobase) has been removed by cleaving the glycosidic bond between the ribose (or deoxyribose) sugar and the base.

[0060] In some embodiments, a double stranded nucleic acid comprises one or more (e.g., 1, 2, 3, 4, 5, or more) modified internucleotide linkages. As used herein, “modified internucleotide linkage” refers to an internucleotide linkage having one or more chemical modifications when compared with a reference internucleotide linkage having a phosphodiester bond. A modified internucleotide linkage can be a non-naturally occurring linkage. In some embodiments, the modified internucleotide linkage is phosphorothioate (PS) linkage. Examples of other modified nucleic acids and modified internucleotide linkages include, but are not limited to, borano-phosphate, alkyl phosphonate inhibitory nucleic acids, peptide inhibitory nucleic acids, and morpholinos. Morpholino backbones are described, for example by Corey and Abrams Genome Biol. 2001; 2(5): reviews1015.1-reviews1015.3.

[0061] The number of modified internucleotide linkages in each strand of a double stranded nucleic acid may vary. In some embodiments, each strand of a double stranded nucleic acid comprises between 1 and 23 (e.g., 1, 2, 3, 4, 5, 6, 7, 8, 9, 10, 11, 12, 13, 14, 15, 16, 17, 18, 19, 20, 21, 22, or 23) modified internucleotide linkages. In some embodiments, a sense strand of a double stranded nucleic acid comprises between 1 and 5 (e.g., 1, 2, 3, 4, or 5) modified internucleotide linkages. In some embodiments, the modified internucleotide linkages are positioned beginning at the first nucleotide of the 5′-end of the sense strand. In some embodiments, the modified internucleotide linkages are positioned between the last two nucleotides of the 3′-end of the sense strand (e.g., at one or more of positions 1, 2, and 3 relative to the 3′ end of the sense strand). In some embodiments, an antisense strand of a double stranded nucleic acid comprises between 1 and 5 (e.g., 1, 2, 3, 4, or 5) modified internucleotide linkages. In some embodiments, the modified internucleotide linkages are positioned beginning at the first nucleotide of the 5′-end of the antisense strand. In some embodiments, the modified internucleotide linkages are positioned between the last two nucleotides of the 3′-end of the antisense strand (e.g., at one or more of positions 1, 2, and 3 relative to the 3′ end of the antisense strand). In some embodiments, each of the modified internucleotide linkages is a phosphorothioate (PS) linkage.

[0062] In some embodiments, the antisense strand of a double stranded nucleic acid comprises no more than four phosphorothioate internucleotide linkages. In some embodiments, positions 1 and 2 (e.g., relative to the 5′ end or 3′ end) of a sense strand are linked by modified internucleotide linkages. In some embodiments, positions 1 and 2 (e.g., relative to the 5′ end or 3′ end) of an antisense strand are linked by a phosphorothioate internucleotide linkage. In some embodiments, positions 2 and 3 (e.g., relative to the 5′ end or 3′ end) of a sense strand are linked by a modified internucleotide linkage. In some embodiments, positions 2 and 3 (e.g., relative to the 5′ end or 3′ end) of an antisense strand are linked by a phosphorothioate internucleotide linkage.

[0063] In some embodiments, the target mRNA of an inhibitory nucleic acid corresponds to a gene sequence encoding a wild-type protein, or any variant (e.g., mutant, disease-associated allele, isoform, etc.) thereof. However, these examples should be considered non-limiting as the chemical modifications described in the present disclosure may be applied to virtually any inhibitory nucleic acid sequence to perform targeted knockdown of target mRNAs.

[0064] In some embodiments, a double stranded nucleic acid downregulates expression or activity of a target mRNA. The amount of downregulation mediated by a double stranded nucleic acid may vary. In some embodiments, a double stranded nucleic acid decreases expression level or activity of a target mRNA transcript between 1-fold and 100-fold, 2-fold and 10-fold, 5-fold and 20-fold, 10-fold and 30-fold, 20-fold and 50-fold, or 25-fold and 100-fold, or any value therebetween (e.g., relative to the expression or activity of the target mRNA that has not been contacted with the double stranded nucleic acid). In some embodiments, a double stranded nucleic acid decreases expression level or activity of a target mRNA transcript by about 2-fold, 3-fold, 4-fold, 5-fold, 6-fold, 7-fold, 8-fold, 9-fold, 10-fold, 15-fold, or 20-fold (e.g., relative to the expression or activity of the target mRNA that has not been contacted with the double stranded nucleic acid). In some embodiments, a double stranded nucleic acid decreases expression level or activity of a target mRNA transcript more than 100-fold, for example at least 200-fold, 400-fold, 500-fold, or 1000-fold (e.g., relative to the expression or activity of the target mRNA that has not been contacted with the double stranded nucleic acid).

[0065] In some embodiments, a double stranded nucleic acid is an isolated nucleic acid. It will be understood by those of skill in the art that an “isolated” nucleic acid is one that is artificially produced. Artificial production of an isolated nucleic acid may be achieved, for example, through amplification in vitro through polymerase chain reaction (PCR), in vitro transcription, in vitro reverse transcription, recombinant cloning, or chemical synthesis. Methods of synthesizing isolated nucleic acids, for example RNAs, are known in the art, for example as described by Soukchareun et al. Preparation and characterization of antisense oligonucleotide-peptide hybrids containing viral fusion peptides. Bioconjug Chem. 1995 January-February; 6(1):43-53. doi: 10.1021/bc00031a004. PMID: 7711103. In some embodiments, sense strand and antisense strands of inhibitory nucleic acids can be synthesized using, for example, solid-phase synthesis by employing phosphoramidite chemistry methodology (e.g., Current Protocols in Inhibitory nucleic acid Chemistry, Beaucage, S. L. et al. (Edrs.), John Wiley & Sons, Inc., New York, NY, USA), H-phosphonate, phosphortriester chemistry, or enzymatic synthesis. Automated commercial synthesizers can be used, for example, MerMade™ 12 from LGC Biosearch Technologies, or other synthesizers from BioAutomation or Applied Biosystems. Phosphorothioate linkages can be introduced using a sulfurizing reagent such as phenylacetyl disulfide or DDTT ((dimethylaminomethylidene) amino)-3H-1,2,4-dithiazaoline-3-thione). It is well known to use similar techniques and commercially available modified amidites and controlled-pore glass (CPG) products to synthesize modified oligonucleotides or conjugated oligonucleotides.

[0066] Purification methods can be used to exclude the unwanted impurities from the final oligonucleotide product. Commonly used purification techniques for single stranded oligonucleotides include reverse-phase ion pair high performance liquid chromatography (RP-IP-HPLC), capillary gel electrophoresis (CGE), anion exchange HPLC (AX-HPLC), and size exclusion chromatography (SEC). After purification, oligonucleotides can be analyzed by mass spectrometry and quantified by spectrophotometry at a wavelength of 260 nm. The sense strand and antisense strand can then be annealed to form a double stranded RNA.

### Sense and Antisense Strands

[0067] Aspects of the disclosure relate to double stranded nucleic acids having sense and antisense strands, each of which comprise certain patterns of chemical modifications (e.g., patterns of 2′F-modified nucleotides). As used herein, “antisense strand” means a single-stranded oligonucleotide that is complementary to a region of a target sequence (e.g., a sequence of a target mRNA). Likewise, and as used herein, “sense strand” means a single-stranded oligonucleotide that is complementary to a region of an antisense strand.

[0068] Aspects of the disclosure are based, in part, on antisense strands having 2′F-modified nucleotides at the following combinations of positions relative to the 5′ end of the antisense strand:2, 5, 7, 14, and 16; 2, 3, 7, 14, and 16; 2, 5, 8, 14, and 16; 2, 4, 6, 8, 14, and 16; or 2, 6, 8, 14, and 16. In some embodiments, the 2′F-modified antisense strands do not comprise any 2′F-modified nucleotides other than those at the listed positions. In some embodiments antisense strands (and double stranded nucleic acids comprising such antisense strands) have improved potency, durability, and/or reduced off-target effects relative to previously described chemically-modified double stranded nucleic acids.

[0069] In some embodiments, an antisense strand comprises 2′F-modified nucleotides at the following positions relative to the 5′ end of the antisense strand: 2, 5, 7, 14, and 16, and does not comprise any 2′F-modified nucleotides other than those at the listed positions. In some embodiments, the antisense strand further comprises one or more additional modified nucleotides. In some embodiments, the antisense strand comprises 1, 2, 3, 4, 5, 6, 7, 8, 9, 10, 11, 12, 13, 14, 15, 16, 17, 18, 19, 20, 21, 22, or 23 additional modified nucleotides. In some embodiments, the one or more additional modified nucleotides each comprise a 2′O-alkyl modification, e.g., 2′O-methyl (2′O-Me) modification or 2′O—C₁₂₋₁₆ alkyl modification. In some embodiments, each of the one or more additional modified nucleotides comprises a 2′O-methyl (2′O-Me) modification. In some embodiments, the antisense strand comprises one or more abasic moieties. In some embodiments, the antisense strand comprises 1 or more (e.g., 1, 2, 3, 4, 5, 6, 7, 8, or more) modified internucleotide linkages. In some embodiments, the modified internucleotide linkages are phosphorothioate (PS) linkages. In some embodiments, an antisense strand comprises PS linkages between positions 1 and 2 relative to the 5′ end of the antisense strand. In some embodiments, an antisense strand comprises PS linkages between positions 1 and 2 relative to the 3′ end of the antisense strand. In some embodiments, an antisense strand comprises PS linkages between positions 1 and 2 relative to the 5′ end of the antisense strand, and positions 1 and 2 relative to the 3′ end of the antisense strand. In some embodiments, an antisense strand comprises PS linkages between positions 1 and 2, and positions 2 and 3, relative to the 3′ end of the antisense strand. In some embodiments, an antisense strand comprises PS linkages between positions 1 and 2, and positions 2 and 3, relative to the 5′ end of the antisense strand, and positions 1 and 2, and positions 2 and 3, relative to the 3′ end of the antisense strand.

[0070] In some embodiments, the antisense strand is hybridized to a sense strand. In some embodiments, the sense strand comprises one or more 2′F-modified nucleotides. In some embodiments, the sense strand comprises 2′F-modified nucleotides at the following positions: (a) positions 9, 10, and 11; (b) positions 7, 9, and 11; (c) positions 7, 9, 10; or (d) positions 7, 10, and 11. In some embodiments, the sense strand does not comprise any 2′F-modified nucleotides at positions other than the listed positions. In some embodiments, the sense strand further comprises one or more additional modified nucleotides. In some embodiments, the sense strand comprises 1, 2, 3, 4, 5, 6, 7, 8, 9, 10, 11, 12, 13, 14, 15, 16, 17, 18, 19, 20, 21, 22, or 23 additional modified nucleotides. In some embodiments, the one or more additional modified nucleotides each comprise a 2′O-alkyl modification. In some embodiments, each of the one or more additional modified nucleotides comprises a 2′O-methyl (2′O-Me) modification. In some embodiments, the sense strand comprises one or more abasic moieties. In some embodiments, the sense strand comprises 1 or more (e.g., 1, 2, 3, 4, 5, 6, 7, 8, or more) modified internucleotide linkages. In some embodiments, the modified internucleotide linkages are phosphorothioate (PS) linkages. In some embodiments, a sense strand comprises PS linkages between positions 1 and 2 relative to the 5′ end of the sense strand. In some embodiments, a sense strand comprises PS linkages between positions 1 and 2 relative to the 3′ end of the sense strand. In some embodiments, a sense strand comprises PS linkages between positions 1 and 2 relative to the 5′ end of the sense strand, and positions 1 and 2 relative to the 3′ end of the sense strand. In some embodiments, a sense strand comprises PS linkages between positions 1 and 2, and positions 2 and 3, relative to the 3′ end of the sense strand. In some embodiments, a sense strand comprises PS linkages between positions 1 and 2, and positions 2 and 3, relative to the 5′ end of the sense strand, and positions 1 and 2, and positions 2 and 3, relative to the 3′ end of the sense strand.

[0071] In some embodiments, the disclosure provides a double stranded nucleic acid comprising a sense strand; and an antisense strand having a 5′-end and a 3′-end, and consisting of modified nucleotides, wherein the modified nucleotides consist of 2′F-modified nucleotides located at positions 2, 3, 7, 14, and 16 relative to the 5′-end of the antisense strand, and 2′O-Me modified nucleotides at the other positions of the antisense strand, and wherein the sense strand comprises 2′F-modified nucleotides located at and only at the following positions: (a) positions 9, 10, and 11; (b) positions 7, 9, and 11; (c) positions 7, 9, 10; or (d) positions 7, 10, and 11, and 2′O-Me modified nucleotides, 2′O—C₁₂₋₁₆ alkyl modified nucleotides or abasic moiety at the other positions of the sense strand; and wherein each of the sense and antisense strands comprise PS linkages between positions 1 and 2, and positions 2 and 3, relative to their respective 5′ ends and 3′ ends.

[0072] In some embodiments, an antisense strand comprises 2′F-modified nucleotides at the following positions relative to the 5′ end of the antisense strand: 2, 3, 7, 14, and 16, and does not comprise any 2′F-modified nucleotides other than those at the listed positions. In some embodiments, the antisense strand further comprises one or more additional modified nucleotides. In some embodiments, the antisense strand comprises 1, 2, 3, 4, 5, 6, 7, 8, 9, 10, 11, 12, 13, 14, 15, 16, 17, 18, 19, 20, 21, 22, or 23 additional modified nucleotides. In some embodiments, the one or more additional modified nucleotides each comprise a 2′O-alkyl modification. In some embodiments, each of the one or more additional modified nucleotides comprises a 2′O-methyl (2′O-Me) modification. In some embodiments, the antisense strand comprises one or more abasic moieties. In some embodiments, the antisense strand comprises 1 or more (e.g., 1, 2, 3, 4, 5, 6, 7, 8, or more) modified internucleotide linkages. In some embodiments, the modified internucleotide linkages are phosphorothioate (PS) linkages. In some embodiments, an antisense strand comprises PS linkages between positions 1 and 2 relative to the 5′ end of the antisense strand. In some embodiments, an antisense strand comprises PS linkages between positions 1 and 2 relative to the 3′ end of the antisense strand. In some embodiments, an antisense strand comprises PS linkages between positions 1 and 2 relative to the 5′ end of the antisense strand, and positions 1 and 2 relative to the 3′ end of the antisense strand. In some embodiments, an antisense strand comprises PS linkages between positions 1 and 2, and positions 2 and 3, relative to the 3′ end of the antisense strand. In some embodiments, an antisense strand comprises PS linkages between positions 1 and 2, and positions 2 and 3, relative to the 5′ end of the antisense strand, and positions 1 and 2, and positions 2 and 3, relative to the 3′ end of the antisense strand.

[0073] In some embodiments, the antisense strand is hybridized to a sense strand. In some embodiments, the sense strand comprises one or more 2′F-modified nucleotides. In some embodiments, the sense strand comprises 2′F-modified nucleotides at the following positions: (a) positions 9, 10, and 11; (b) positions 7, 9, and 11; (c) positions 7, 9, 10; or (d) positions 7, 10, and 11. In some embodiments, the sense strand does not comprise any 2′F-modified nucleotides at positions other than the listed positions. In some embodiments, the sense strand further comprises one or more additional modified nucleotides. In some embodiments, the sense strand comprises 1, 2, 3, 4, 5, 6, 7, 8, 9, 10, 11, 12, 13, 14, 15, 16, 17, 18, 19, 20, 21, 22, or 23 additional modified nucleotides. In some embodiments, the one or more additional modified nucleotides each comprise a 2′O-alkyl modification. In some embodiments, each of the one or more additional modified nucleotides comprises a 2′O-methyl (2′O-Me) modification. In some embodiments, the sense strand comprises one or more 2′O—C₁₂₋₁₆ alkyl modified nucleotides. In some embodiments, the sense strand comprises one or more abasic moieties. In some embodiments, the sense strand comprises 1 or more (e.g., 1, 2, 3, 4, 5, 6, 7, 8, or more) modified internucleotide linkages. In some embodiments, the modified internucleotide linkages are phosphorothioate (PS) linkages. In some embodiments, a sense strand comprises PS linkages between positions 1 and 2 relative to the 5′ end of the sense strand. In some embodiments, a sense strand comprises PS linkages between positions 1 and 2 relative to the 3′ end of the sense strand. In some embodiments, a sense strand comprises PS linkages between positions 1 and 2 relative to the 5′ end of the sense strand, and positions 1 and 2 relative to the 3′ end of the sense strand. In some embodiments, a sense strand comprises PS linkages between positions 1 and 2, and positions 2 and 3, relative to the 3′ end of the sense strand. In some embodiments, a sense strand comprises PS linkages between positions 1 and 2, and positions 2 and 3, relative to the 5′ end of the sense strand, and positions 1 and 2, and positions 2 and 3, relative to the 3′ end of the sense strand.

[0074] In some embodiments, the disclosure provides a double stranded nucleic acid comprising a sense strand; and an antisense strand having a 5′-end and a 3′-end, and consisting of modified nucleotides, wherein the modified nucleotides consist of 2′F-modified nucleotides located at positions 2, 5, 7, 14, and 16 relative to the 5′-end of the antisense strand, and 2′O-Me modified nucleotides at the other positions of the antisense strand, and wherein the sense strand comprises 2′F-modified nucleotides located at and only at the following positions: (a) positions 9, 10, and 11; (b) positions 7, 9, and 11; (c) positions 7, 9, 10; or (d) positions 7, 10, and 11, and 2′O-Me modified nucleotides, 2′O—C₁₂₋₁₆ alkyl modified nucleotides or abasic moiety at the other positions of the sense strand; and wherein each of the sense and antisense strands comprise PS linkages at between positions 1 and 2, and positions 2 and 3, relative to their respective 5′ ends and 3′ ends.

[0075] In some embodiments, an antisense strand comprises 2′F-modified nucleotides at the following positions relative to the 5′ end of the antisense strand: 2, 5, 7, 14, and 16, and does not comprise any 2′F-modified nucleotides other than those at the listed positions. In some embodiments, the antisense strand further comprises one or more additional modified nucleotides. In some embodiments, the antisense strand comprises 1, 2, 3, 4, 5, 6, 7, 8, 9, 10, 11, 12, 13, 14, 15, 16, 17, 18, 19, 20, 21, 22, or 23 additional modified nucleotides. In some embodiments, the one or more additional modified nucleotides each comprise a 2′O-alkyl modification. In some embodiments, each of the one or more additional modified nucleotides comprises a 2′O-methyl (2′O-Me) modification. In some embodiments, the antisense strand comprises one or more abasic moieties. In some embodiments, the antisense strand comprises 1 or more (e.g., 1, 2, 3, 4, 5, 6, 7, 8, or more) modified internucleotide linkages. In some embodiments, the modified internucleotide linkages are phosphorothioate (PS) linkages. In some embodiments, an antisense strand comprises PS linkages between positions 1 and 2 relative to the 5′ end of the antisense strand. In some embodiments, an antisense strand comprises PS linkages between positions 1 and 2 relative to the 3′ end of the antisense strand. In some embodiments, an antisense strand comprises PS linkages between positions 1 and 2 relative to the 5′ end of the antisense strand, and positions 1 and 2 relative to the 3′ end of the antisense strand. In some embodiments, an antisense strand comprises PS linkages between positions 1 and 2, and positions 2 and 3, relative to the 3′ end of the antisense strand. In some embodiments, an antisense strand comprises PS linkages between positions 1 and 2, and positions 2 and 3, relative to the 5′ end of the antisense strand, and positions 1 and 2, and positions 2 and 3, relative to the 3′ end of the antisense strand.

[0076] In some embodiments, the antisense strand is hybridized to a sense strand. In some embodiments, the sense strand comprises one or more 2′F-modified nucleotides. In some embodiments, the sense strand comprises 2′F-modified nucleotides at the following positions: (a) positions 9, 10, and 11; (b) positions 7, 9, and 11; (c) positions 7, 9, 10; or (d) positions 7, 10, and 11. In some embodiments, the sense strand does not comprise any 2′F-modified nucleotides at positions other than the listed positions. In some embodiments, the sense strand further comprises one or more additional modified nucleotides. In some embodiments, the sense strand comprises 1, 2, 3, 4, 5, 6, 7, 8, 9, 10, 11, 12, 13, 14, 15, 16, 17, 18, 19, 20, 21, 22, or 23 additional modified nucleotides. In some embodiments, the one or more additional modified nucleotides each comprise a 2′O-alkyl modification. In some embodiments, each of the one or more additional modified nucleotides comprises a 2′O-methyl (2′O-Me) modification. In some embodiments, the sense strand comprises one or more 2′O—C₁₂₋₁₆ alkyl modified nucleotides. In some embodiments, the sense strand comprises one or more abasic moieties. In some embodiments, the sense strand comprises 1 or more (e.g., 1, 2, 3, 4, 5, 6, 7, 8, or more) modified internucleotide linkages. In some embodiments, the modified internucleotide linkages are phosphorothioate (PS) linkages. In some embodiments, a sense strand comprises PS linkages between positions 1 and 2 relative to the 5′ end of the sense strand. In some embodiments, a sense strand comprises PS linkages between positions 1 and 2 relative to the 3′ end of the sense strand. In some embodiments, a sense strand comprises PS linkages between positions 1 and 2 relative to the 5′ end of the sense strand, and positions 1 and 2 relative to the 3′ end of the sense strand. In some embodiments, a sense strand comprises PS linkages between positions 1 and 2, and positions 2 and 3, relative to the 3′ end of the sense strand. In some embodiments, a sense strand comprises PS linkages between positions 1 and 2, and positions 2 and 3, relative to the 5′ end of the sense strand, and positions 1 and 2, and positions 2 and 3, relative to the 3′ end of the sense strand.

[0077] In some embodiments, the disclosure provides a double stranded nucleic acid comprising a sense strand; and an antisense strand having a 5′-end and a 3′-end, and consisting of modified nucleotides, wherein the modified nucleotides consist of 2′F-modified nucleotides located at positions 2, 5, 8, 14, and 16 relative to the 5′-end of the antisense strand, and 2′O-Me modified nucleotides at the other positions of the antisense strand, and wherein the sense strand comprises 2′F-modified nucleotides located at and only at the following positions: (a) positions 9, 10, and 11; (b) positions 7, 9, and 11; (c) positions 7, 9, 10; or (d) positions 7, 10, and 11, and 2′O-Me modified nucleotides, 2′O—C₁₂₋₁₆ alkyl modified nucleotides or abasic moiety at the other positions of the sense strand; and wherein each of the sense and antisense strands comprise PS linkages at between positions 1 and 2, and positions 2 and 3, relative to their respective 5′ ends and 3′ ends.

[0078] In some embodiments, an antisense strand comprises 2′F-modified nucleotides at the following positions relative to the 5′ end of the antisense strand: 2, 5, 8, 14, and 16, and does not comprise any 2′F-modified nucleotides other than those at the listed positions. In some embodiments, the antisense strand further comprises one or more additional modified nucleotides. In some embodiments, the antisense strand comprises 1, 2, 3, 4, 5, 6, 7, 8, 9, 10, 11, 12, 13, 14, 15, 16, 17, 18, 19, 20, 21, 22, or 23 additional modified nucleotides. In some embodiments, the one or more additional modified nucleotides each comprise a 2′O-alkyl modification. In some embodiments, each of the one or more additional modified nucleotides comprises a 2′O-methyl (2′O-Me) modification. In some embodiments, the antisense strand comprises one or more abasic moieties. In some embodiments, the antisense strand comprises 1 or more (e.g., 1, 2, 3, 4, 5, 6, 7, 8, or more) modified internucleotide linkages. In some embodiments, the modified internucleotide linkages are phosphorothioate (PS) linkages. In some embodiments, an antisense strand comprises PS linkages between positions 1 and 2 relative to the 5′ end of the antisense strand. In some embodiments, an antisense strand comprises PS linkages between positions 1 and 2 relative to the 3′ end of the antisense strand. In some embodiments, an antisense strand comprises PS linkages between positions 1 and 2 relative to the 5′ end of the antisense strand, and positions 1 and 2 relative to the 3′ end of the antisense strand. In some embodiments, an antisense strand comprises PS linkages between positions 1 and 2, and positions 2 and 3, relative to the 3′ end of the antisense strand. In some embodiments, an antisense strand comprises PS linkages between positions 1 and 2, and positions 2 and 3, relative to the 5′ end of the antisense strand, and positions 1 and 2, and positions 2 and 3, relative to the 3′ end of the antisense strand.

[0079] In some embodiments, the antisense strand is hybridized to a sense strand. In some embodiments, the sense strand comprises one or more 2′F-modified nucleotides. In some embodiments, the sense strand comprises 2′F-modified nucleotides at the following positions: (a) positions 9, 10, and 11; (b) positions 7, 9, and 11; (c) positions 7, 9, 10; or (d) positions 7, 10, and 11. In some embodiments, the sense strand does not comprise any 2′F-modified nucleotides at positions other than the listed positions. In some embodiments, the sense strand further comprises one or more additional modified nucleotides. In some embodiments, the sense strand comprises 1, 2, 3, 4, 5, 6, 7, 8, 9, 10, 11, 12, 13, 14, 15, 16, 17, 18, 19, 20, 21, 22, or 23 additional modified nucleotides. In some embodiments, the one or more additional modified nucleotides each comprise a 2′O-alkyl modification. In some embodiments, each of the one or more additional modified nucleotides comprises a 2′O-methyl (2′O-Me) modification. In some embodiments, the sense strand comprises one or more 2′O—C₁₂₋₁₆ alkyl modified nucleotides. In some embodiments, the sense strand comprises one or more abasic moieties. In some embodiments, the sense strand comprises 1 or more (e.g., 1, 2, 3, 4, 5, 6, 7, 8, or more) modified internucleotide linkages. In some embodiments, the modified internucleotide linkages are phosphorothioate (PS) linkages. In some embodiments, a sense strand comprises PS linkages between positions 1 and 2 relative to the 5′ end of the sense strand. In some embodiments, a sense strand comprises PS linkages between positions 1 and 2 relative to the 3′ end of the sense strand. In some embodiments, a sense strand comprises PS linkages between positions 1 and 2 relative to the 5′ end of the sense strand, and positions 1 and 2 relative to the 3′ end of the sense strand. In some embodiments, a sense strand comprises PS linkages between positions 1 and 2, and positions 2 and 3, relative to the 3′ end of the sense strand. In some embodiments, a sense strand comprises PS linkages between positions 1 and 2, and positions 2 and 3, relative to the 5′ end of the sense strand, and positions 1 and 2, and positions 2 and 3, relative to the 3′ end of the sense strand.

[0080] In some embodiments, the disclosure provides a double stranded nucleic acid comprising a sense strand; and an antisense strand having a 5′-end and a 3′-end, and consisting of modified nucleotides, wherein the modified nucleotides consist of 2′F-modified nucleotides located at positions 2, 4, 6, 8, 14, and 16 relative to the 5′-end of the antisense strand, and 2′O-Me modified nucleotides at the other positions of the antisense strand, and wherein the sense strand comprises 2′F-modified nucleotides located at and only at the following positions: (a) positions 9, 10, and 11; (b) positions 7, 9, and 11; (c) positions 7, 9, 10; or (d) positions 7, 10, and 11, and 2′O-Me modified nucleotides, 2′O—C₁₂₋₁₆ alkyl modified nucleotides or abasic moiety at the other positions of the sense strand; and wherein each of the sense and antisense strands comprise PS linkages at between positions 1 and 2, and positions 2 and 3, relative to their respective 5′ ends and 3′ ends.

[0081] In some embodiments, an antisense strand comprises 2′F-modified nucleotides at the following positions relative to the 5′ end of the antisense strand: 2, 4, 6, 8, 14, and 16, and does not comprise any 2′F-modified nucleotides other than those at the listed positions. In some embodiments, the antisense strand further comprises one or more additional modified nucleotides. In some embodiments, the antisense strand comprises 1, 2, 3, 4, 5, 6, 7, 8, 9, 10, 11, 12, 13, 14, 15, 16, 17, 18, 19, 20, 21, 22, or 23 additional modified nucleotides. In some embodiments, the one or more additional modified nucleotides each comprise a 2′O-alkyl modification. In some embodiments, each of the one or more additional modified nucleotides comprises a 2′O-methyl (2′O-Me) modification. In some embodiments, the antisense strand comprises one or more abasic moieties. In some embodiments, the antisense strand comprises 1 or more (e.g., 1, 2, 3, 4, 5, 6, 7, 8, or more) modified internucleotide linkages. In some embodiments, the modified internucleotide linkages are phosphorothioate (PS) linkages. In some embodiments, an antisense strand comprises PS linkages between positions 1 and 2 relative to the 5′ end of the antisense strand. In some embodiments, an antisense strand comprises PS linkages between positions 1 and 2 relative to the 3′ end of the antisense strand. In some embodiments, an antisense strand comprises PS linkages between positions 1 and 2 relative to the 5′ end of the antisense strand, and positions 1 and 2 relative to the 3′ end of the antisense strand. In some embodiments, an antisense strand comprises PS linkages between positions 1 and 2, and positions 2 and 3, relative to the 3′ end of the antisense strand. In some embodiments, an antisense strand comprises PS linkages between positions 1 and 2, and positions 2 and 3, relative to the 5′ end of the antisense strand, and positions 1 and 2, and positions 2 and 3, relative to the 3′ end of the antisense strand.

[0082] In some embodiments, the antisense strand is hybridized to a sense strand. In some embodiments, the sense strand comprises one or more 2′F-modified nucleotides. In some embodiments, the sense strand comprises 2′F-modified nucleotides at the following positions: (a) positions 9, 10, and 11; (b) positions 7, 9, and 11; (c) positions 7, 9, 10; or (d) positions 7, 10, and 11. In some embodiments, the sense strand does not comprise any 2′F-modified nucleotides at positions other than the listed positions. In some embodiments, the sense strand further comprises one or more additional modified nucleotides. In some embodiments, the sense strand comprises 1, 2, 3, 4, 5, 6, 7, 8, 9, 10, 11, 12, 13, 14, 15, 16, 17, 18, 19, 20, 21, 22, or 23 additional modified nucleotides. In some embodiments, the one or more additional modified nucleotides each comprise a 2′O-alkyl modification. In some embodiments, each of the one or more additional modified nucleotides comprises a 2′O-methyl (2′O-Me) modification. In some embodiments, the sense strand comprises one or more 2′O—C₁₂₋₁₆ alkyl modified nucleotides. In some embodiments, the sense strand comprises one or more abasic moieties. In some embodiments, the sense strand comprises 1 or more (e.g., 1, 2, 3, 4, 5, 6, 7, 8, or more) modified internucleotide linkages. In some embodiments, the modified internucleotide linkages are phosphorothioate (PS) linkages. In some embodiments, a sense strand comprises PS linkages between positions 1 and 2 relative to the 5′ end of the sense strand. In some embodiments, a sense strand comprises PS linkages between positions 1 and 2 relative to the 3′ end of the sense strand. In some embodiments, a sense strand comprises PS linkages between positions 1 and 2 relative to the 5′ end of the sense strand, and positions 1 and 2 relative to the 3′ end of the sense strand. In some embodiments, a sense strand comprises PS linkages between positions 1 and 2, and positions 2 and 3, relative to the 3′ end of the sense strand. In some embodiments, a sense strand comprises PS linkages between positions 1 and 2, and positions 2 and 3, relative to the 5′ end of the sense strand, and positions 1 and 2, and positions 2 and 3, relative to the 3′ end of the sense strand.

[0083] In some embodiments, the disclosure provides a double stranded nucleic acid comprising a sense strand; and an antisense strand having a 5′-end and a 3′-end, and consisting of modified nucleotides, wherein the modified nucleotides consist of 2′F-modified nucleotides located at positions 2, 6, 8, 14, and 16 relative to the 5′-end of the antisense strand, and 2′O-Me modified nucleotides at the other positions of the antisense strand, and wherein the sense strand comprises 2′F-modified nucleotides located at and only at the following positions: (a) positions 9, 10, and 11; (b) positions 7, 9, and 11; (c) positions 7, 9, 10; or (d) positions 7, 10, and 11, and 2′O-Me modified nucleotides, 2′O—C₁₂₋₁₆ alkyl modified nucleotides, or abasic moiety at the other positions of the sense strand; and wherein each of the sense and antisense strands comprise PS linkages at between positions 1 and 2, and positions 2 and 3, relative to their respective 5′ ends and 3′ ends.

[0084] In some embodiments, an antisense strand comprises 2′F-modified nucleotides at the following positions relative to the 5′ end of the antisense strand: 2, 6, 8, 14, and 16, and does not comprise any 2′F-modified nucleotides other than those at the listed positions. In some embodiments, the antisense strand further comprises one or more additional modified nucleotides. In some embodiments, the antisense strand comprises 1, 2, 3, 4, 5, 6, 7, 8, 9, 10, 11, 12, 13, 14, 15, 16, 17, 18, 19, 20, 21, 22, or 23 additional modified nucleotides. In some embodiments, the one or more additional modified nucleotides each comprise a 2′O-alkyl modification. In some embodiments, each of the one or more additional modified nucleotides comprises a 2′O-methyl (2′O-Me) modification. In some embodiments, the antisense strand comprises one or more abasic moieties. In some embodiments, the antisense strand comprises 1 or more (e.g., 1, 2, 3, 4, 5, 6, 7, 8, or more) modified internucleotide linkages. In some embodiments, the modified internucleotide linkages are phosphorothioate (PS) linkages. In some embodiments, an antisense strand comprises PS linkages between positions 1 and 2 relative to the 5′ end of the antisense strand. In some embodiments, an antisense strand comprises PS linkages between positions 1 and 2 relative to the 3′ end of the antisense strand. In some embodiments, an antisense strand comprises PS linkages between positions 1 and 2 relative to the 5′ end of the antisense strand, and positions 1 and 2 relative to the 3′ end of the antisense strand. In some embodiments, an antisense strand comprises PS linkages between positions 1 and 2, and positions 2 and 3, relative to the 3′ end of the antisense strand. In some embodiments, an antisense strand comprises PS linkages between positions 1 and 2, and positions 2 and 3, relative to the 5′ end of the antisense strand, and positions 1 and 2, and positions 2 and 3, relative to the 3′ end of the antisense strand.

[0085] In some embodiments, the antisense strand is hybridized to a sense strand. In some embodiments, the sense strand comprises one or more 2′F-modified nucleotides. In some embodiments, the sense strand comprises 2′F-modified nucleotides at the following positions: (a) positions 9, 10, and 11; (b) positions 7, 9, and 11; (c) positions 7, 9, 10; or (d) positions 7, 10, and 11. In some embodiments, the sense strand does not comprise any 2′F-modified nucleotides at positions other than the listed positions. In some embodiments, the sense strand further comprises one or more additional modified nucleotides. In some embodiments, the sense strand comprises 1, 2, 3, 4, 5, 6, 7, 8, 9, 10, 11, 12, 13, 14, 15, 16, 17, 18, 19, 20, 21, 22, or 23 additional modified nucleotides. In some embodiments, the one or more additional modified nucleotides each comprise a 2′O-alkyl modification. In some embodiments, each of the one or more additional modified nucleotides comprises a 2′O-methyl (2′O-Me) modification. In some embodiments, the sense strand comprises one or more 2′O—C₁₂₋₁₆ alkyl modified nucleotides. In some embodiments, the sense strand comprises one or more abasic moieties. In some embodiments, the sense strand comprises 1 or more (e.g., 1, 2, 3, 4, 5, 6, 7, 8, or more) modified internucleotide linkages. In some embodiments, the modified internucleotide linkages are phosphorothioate (PS) linkages. In some embodiments, a sense strand comprises PS linkages between positions 1 and 2 relative to the 5′ end of the sense strand. In some embodiments, a sense strand comprises PS linkages between positions 1 and 2 relative to the 3′ end of the sense strand. In some embodiments, a sense strand comprises PS linkages between positions 1 and 2 relative to the 5′ end of the sense strand, and positions 1 and 2 relative to the 3′ end of the sense strand. In some embodiments, a sense strand comprises PS linkages between positions 1 and 2, and positions 2 and 3, relative to the 3′ end of the sense strand. In some embodiments, a sense strand comprises PS linkages between positions 1 and 2, and positions 2 and 3, relative to the 5′ end of the sense strand, and positions 1 and 2, and positions 2 and 3, relative to the 3′ end of the sense strand.

[0086] In some embodiments, a sense strand comprises a nucleotide sequence that is about 70%, 75%, 80%, 85%, 90%, 95%, or 99% identical to the sequence set forth in any one of SEQ ID NOs: 1-199. In some embodiments, the sense strand comprises a nucleotide sequence that is 100% identical to any one of SEQ ID NOs: 1-199. In some embodiments, the antisense strand comprises a nucleotide sequence that is about 70%, 75%, 80%, 85%, 90%, 95%, or 99% identical to any of the sequences set forth in any one of SEQ ID NOs: 1-199. In some embodiments, the antisense strand comprises a nucleotide sequence that is 100% identical to any one of SEQ ID NOs: 1-199.

[0087] In some embodiments, a double stranded nucleic acid comprises a sense strand and antisense strand having about 70%, 75%, 80%, 85%, 90%, 95%, or 99% sequence identity to the sense and antisense strand pairs set forth in any of SEQ ID NOs: 1-199. In some embodiments, the double stranded nucleic acid comprises a sense strand and antisense strand that is 100% identical to the sense and antisense strand pairs set forth in any of SEQ ID NOs: 1-199. In some embodiments, a double stranded nucleic acid comprises a sense strand having a modification pattern set forth in any one of SEQ ID NOs: 1-199. In some embodiments, a double stranded nucleic acid comprises an antisense strand having a modification pattern set forth in any one of SEQ ID NOs: 1-199.

[0088] Aspects of the disclosure relate to double stranded nucleic acids that are not conjugated to any other molecule(s) (e.g., delivery molecules, such as antibodies, lipids, sugars, etc.). In some embodiments, a double stranded nucleic acid is not conjugated to a lipid, for example cholesterol, tocopherol, etc. In some embodiments, a double stranded nucleic acid is not conjugated to an antibody, such as a transferrin receptor antibody, low density lipoprotein receptor (LDLR) antibody, etc. In some embodiments, a double stranded nucleic acid is not conjugated to a sugar, such as N-acetylgalactosamine (GalNAc). However, the skilled artisan recognizes that, in some embodiments, double stranded nucleic acids described herein may be attached to one or more delivery molecules to form a conjugate, as described in further detail below.

### Conjugates

[0089] Aspects of the disclosure relate to compositions comprising a double stranded nucleic acid as described herein optionally attached to a delivery molecule. As used herein, a “delivery molecule” refers to an agent that assists in delivery of the double stranded nucleic acid into a target cell, directing the tissue or cell specificity of the double stranded nucleic acid, and/or adds additional functionality to the double stranded nucleic acid. In some embodiments, a delivery molecule comprises a lipid, peptide, protein, antibody, or small molecule. Examples of delivery molecules include but are not limited to lipid (e.g., fatty acid, cholesterol, tocopherol, etc.), antibodies (e.g., cell receptor-specific antibodies, therapeutic antibodies, etc.), antigen binding fragments (e.g., Fab, single chain variable fragments (scFvs)), radioligands, sugars (e.g., GalNAc, etc.). In some embodiments, a double stranded nucleic acid is conjugated to a lipid (e.g., cholesterol, tocopherol). In some embodiments, a double stranded nucleic acid is conjugated to a peptide or antibody (e.g., protamine, cell receptor-specific antibodies, etc.). In some embodiments, the antibody is not a transferrin receptor antibody. In some embodiments, a double stranded nucleic acid is conjugated to a sugar (e.g., GalNAc).

[0090] In some embodiments, a delivery molecule is connected (e.g., conjugated, or bound) to a double stranded nucleic acid. The delivery molecule may be directly connected (e.g., by forming one or more interactions or bonds with a nucleotide or internucleotide linkage of the double stranded nucleic acid), or indirectly connected (e.g., via one or more linker molecules) to the double stranded nucleic acid. A delivery molecule may be connected (e.g., conjugated or bound) to a double stranded nucleic acid at any suitable position. For example, a delivery molecule may be conjugated to a terminus (e.g., a 5′ end or 3′ end) of a double stranded nucleic acid, or to an internal nucleotide or internucleotide linkage of a double stranded nucleic acid.

[0091] In some embodiments, a delivery molecule is directly conjugated to a double stranded nucleic acid. In some embodiments, a delivery molecule is indirectly conjugated to a double stranded nucleic acid, e.g., via a linker. In some embodiments, the linker comprises an amino acid linker (e.g., a glycine-rich linker, glycine-serine linker, proline linker, etc.), or a small molecule (e.g., poly-ethylene glycol linker, etc.). In some embodiments, the linker is a Mal-Tet-TCO linker, SMCC linker, or GDM linker and the delivery molecule is an antibody that does not bind to a transferrin receptor. In some embodiments, the linker is not a Mal-Tet-TCO linker, SMCC linker, or GDM linker and the antibody is an antibody that does not bind to a transferrin receptor. In some embodiments, the linker is a triethylene glycol (TEG) linker. In some embodiments, a conjugate comprises a double stranded nucleic acid comprising the sequence set forth in any one of SEQ ID NOs: 1-199, a TEG linker, and a cholesterol or tocopherol.

[0092] Aspects of the disclosure relate to conjugates comprising a double stranded nucleic acid as described herein and a GalNAc delivery molecule. Delivery molecules comprising N-acetylgalactosamine (GalNAc) are known to target the asialoglycoprotein receptor on liver cells and are one modality for delivery of double stranded nucleic acids to a desired tissue. In some embodiments, a double stranded nucleic acid is conjugated to a GalNAc delivery molecule comprising the structure of Formula II:

[chemical structure]

[0093] In some embodiments, the double stranded nucleic acid is conjugated to Formula II via a linker. Suitable linkers are known in the art. In one embodiment, the linker comprises an alkyl chain, suitably C1-10 (e.g., a C6 chain). In some embodiments, the linker comprises a C6 amide (C6-NH₂). In a further embodiment, the linker is shown below as Linker 1 with connection points A and B (Formula III). In another embodiment the linker comprises a piperidine. In a further suitable embodiment, the linker is shown below as Linker 2 with connection points C and D (Formula IV).

[chemical structure]

[0094] In an embodiment Linker 1 (Formula III), connection point A, or Linker 2 (Formula IV), connection point C, is conjugated to Formula II. In an embodiment, connection point A of Linker 1 is conjugated to Formula II and connection point B of Linker 1 is conjugated to a double stranded nucleic acid. In an embodiment, connection point C of Linker 2 is conjugated to Formula II and connection point D of Linker 2 is conjugated to a double stranded nucleic acid. In an embodiment, connection point A of Linker 1 is conjugated to Formula II and connection point B of Linker 1 is conjugated to a phosphate group which is conjugated to a double stranded nucleic acid. In an embodiment, connection point C of Linker 2 is conjugated to Formula II and connection point D of Linker 2 is conjugated to a phosphate group which is conjugated to a double stranded nucleic acid.

[0095] One of skill in the art will recognize that the linker may be on the 5′ or 3′ end of a double stranded nucleic acid, or attached to one of the internal nucleotide or nucleoside bases. One of skill in the art will also recognize that the linker may be linked or conjugated to the 5′ or 3′ end of a double stranded nucleic acid. One of skill in the art will also recognize that placement of a delivery molecule, such as the delivery molecules comprising Formula II, whether via a linker or not, on the 5′ end a double stranded nucleic acid may need to overcome potential inefficient loading of Ago2 loading, or other hindrance of the RISC complex activity. For example, for a delivery molecule comprising Formula II linked or directly conjugated to an siRNA comprising a sense and an antisense strand, placement of the delivery moiety at the 5′ end of the antisense strand may create difficulties for Ago2 loading and prevent efficient knockdown. In a suitable embodiment, the one or more double stranded nucleic acids comprise an siRNA comprising a sense and an antisense strand, and the delivery moiety comprising Formula II is present on the 3′ end of the sense strand. In a further embodiment, the delivery moiety comprising Formula II is conjugated to the 3′ end of the sense strand via a linker. In yet a further embodiment the linker comprises a ring structure, suitably a piperidine ring. In yet a further embodiment, the linker comprises Linker 2.

### Pharmaceutical Compositions

[0096] Compositions described herein may further comprise a pharmaceutical excipient, buffer, or diluent, and may be formulated for administration to a host cell ex vivo or in situ in an animal, and particularly a human being. Such compositions may further optionally comprise a liposome, a lipid, a lipid complex, a lipid nanoparticle (LNP), a microsphere, a microparticle, a nanosphere, or a nanoparticle, or may be otherwise formulated for administration to the cells, tissues, organs, or body of a subject in need thereof. Such compositions may be formulated for use in a variety of therapies, such as for example, in the amelioration, prevention, and/or treatment of conditions related to the expression of a mutant protein, polypeptide or peptide or overexpression of a protein, polypeptide or peptide.

[0097] Formulations comprising pharmaceutically-acceptable excipients and/or carrier solutions are well-known to those of skill in the art, as is the development of suitable dosing and treatment regimens for using the particular compositions described herein in a variety of treatment regimens, including e.g., oral, parenteral, intravenous, intrathecal, subcutaneous, or intracisternal magna, intranasal, intra-articular, and intramuscular administration and formulation.

[0098] Typically, these formulations may contain at least about 0.1% of the therapeutic agent (e.g., nucleic acid or liposome comprising the nucleic acid) or more, although the percentage of the active ingredient(s) may, of course, be varied and may conveniently be between about 1 or 2% and about 70% or 90% or more of the weight or volume of the total formulation. The amount of therapeutic agent(s) in each therapeutically-useful composition may be prepared in such a way that a suitable dosage will be obtained in any given unit dose of the compound. Factors such as solubility, stability, bioavailability, biological half-life, route of administration, product shelf life, as well as other pharmacological considerations will be contemplated by one skilled in the art when preparing such pharmaceutical formulations. Additionally, a variety of dosages and treatment regimens may be desirable.

[0099] In certain circumstances, it will be desirable to deliver the nucleic acids or preparations thereof in suitably formulated pharmaceutical compositions disclosed herein; either subcutaneously, intraocularly, intravitreally, parenterally, intravenously, intracerebro-ventricularly, intracisternal magna, intramuscularly, intrathecally, orally, intraperitoneally, or by oral or nasal inhalation, or by direct injection to one or more cells, tissues, or organs.

[0100] The pharmaceutical formulations of the compositions suitable for injectable use include sterile aqueous solutions or dispersions. In some embodiments, the formulation is sterile and fluid to the extent that easy syringability exists. In some embodiments, the form is stable under the conditions of manufacture and storage, and is preserved against the contaminating action of microorganisms, such as bacteria and fungi. The carrier may be a solvent or dispersion medium containing, for example, water, saline, ethanol, polyol (e.g., glycerol, propylene glycol, and liquid polyethylene glycol, and the like), suitable mixtures thereof, vegetable oils or other pharmaceutically acceptable carriers such as those that are Generally Recognized as Safe (GRAS) by the United States Food and Drug Administration. Proper fluidity may be maintained, for example, by the use of a coating, such as lecithin, by the maintenance of the required particle size in the case of dispersion and by the use of surfactants. The nucleic acids may thus be delivered along with various other pharmaceutically acceptable agents as required in the particular instance. Such compositions may be purified from host cells or other biological sources, or alternatively may be chemically synthesized as described herein.

[0101] The amount of nucleic acids and/or nucleic acid compositions and time of administration of such compositions will be within the purview of the skilled artisan having the benefit of the present teachings. In some embodiments, the administration is a single administration. In some embodiments, the administration is more than one administration. In some circumstances, the administration schedule may be determined by the medical practitioner overseeing the administration of such compositions.

[0102] Toxicity and efficacy of the compositions utilized in methods of the present disclosure may be determined by standard pharmaceutical procedures, using either cells in culture or experimental animals to determine the LD50 (the dose lethal to 50% of the population) and/or IC50 (half maximal inhibitory concentration). The dose of the composition used for a therapeutic purpose may be chosen based on the ratio between toxicity and efficacy the therapeutic index and thus may be expressed as the ratio LD50/ED50 or LD50/IC50 (where “ED50” means the dose which is effective in 50% of the population and “IC50” means the dose which is effective for 50% inhibition of target mRNA translation). Those compositions that exhibit large therapeutic indices are preferred. While compositions that exhibit toxic side effects may be used, care should be taken to design a delivery system that minimizes the potential damage of such side effects. The dosage of compositions as described herein lies generally within a range that includes an ED50 or IC50 with little or no toxicity. The dosage may vary within this range depending upon the dosage form employed and the route of administration utilized.

[0103] Other aspects of the present disclosure relate to methods and preparations for use with a subject, such as human or non-human subjects, a host cell in situ in a subject, a host cell ex vivo, or a host cell derived from a subject. Non-limiting examples of subjects include dogs and cats; livestock such as horses, cattle, pigs, sheep, goats, and chickens; and other animals such as mice, rats, guinea pigs, and hamsters. In some embodiments, the subject is a human subject.

[0104] In some embodiments, one or more pharmaceutically acceptable excipients (including vehicles, carriers, diluents, and/or delivery polymers) are added to the pharmaceutical compositions including a therapeutic, thereby forming a pharmaceutical formulation suitable for in vivo delivery to a subject, such as a human.

[0105] A pharmaceutical composition or medicament includes a pharmacologically effective amount of at least one of the therapeutic and optionally one or more pharmaceutically acceptable excipients. Pharmaceutically acceptable excipients (excipients) are substances other than the Active Pharmaceutical Ingredient (API, therapeutic product) that are intentionally included in the drug delivery system. Excipients do not exert or are not intended to exert a therapeutic effect at the intended dosage. Excipients may act to a) aid in processing of the drug delivery system during manufacture, b) protect, support or enhance stability, bioavailability or patient acceptability of the API, c) assist in product identification, and/or d) enhance any other attribute of the overall safety, effectiveness, of delivery of the API during storage or use. A pharmaceutically acceptable excipient may or may not be an inert substance.

[0106] Excipients include, but are not limited to: absorption enhancers, anti-adherents, anti-foaming agents, anti-oxidants, binders, buffering agents, carriers, coating agents, colors, delivery enhancers, delivery polymers, dextran, dextrose, diluents, disintegrants, emulsifiers, extenders, fillers, flavors, glidants, humectants, lubricants, oils, polymers, preservatives, saline, salts, solvents, sugars, suspending agents, sustained release matrices, sweeteners, thickening agents, tonicity agents, vehicles, water-repelling agents, and wetting agents.

[0107] The pharmaceutical compositions can contain other additional components commonly found in pharmaceutical compositions. Such additional components can include, but are not limited to: anti-pruritics, astringents, local anesthetics, or anti-inflammatory agents (e.g., antihistamine, diphenhydramine).

[0108] The carrier can be, but is not limited to, a solvent or dispersion medium containing, for example, water, ethanol, polyol (for example, glycerol, propylene glycol, and liquid polyethylene glycol), and suitable mixtures thereof. A carrier may also contain adjuvants such as preservatives, wetting agents, emulsifying agents, and dispersing agents. A carrier may also contain isotonic agents, such as sugars, polyalcohols, sodium chloride, and the like into the compositions.

[0109] Pharmaceutically acceptable refers to those properties and/or substances which are acceptable to the subject from a pharmacological/toxicological point of view. The phrase pharmaceutically acceptable refers to molecular entities, compositions, and properties that are physiologically tolerable and do not typically produce an allergic or other untoward or toxic reaction when administered to a subject. In some embodiments, a pharmaceutically acceptable compound is approved by a regulatory agency of the Federal or a state government or listed in the U.S. Pharmacopeia or other generally recognized pharmacopeia for use in animals and more particularly in humans.

### Methods

[0110] Aspects of the disclosure relate to methods for inhibiting or reducing a target mRNA in a cell, using a composition (e.g., a double stranded nucleic acid, conjugate, pharmaceutical composition, etc.) as described herein. In some embodiments, the methods comprise contacting a cell comprising the target mRNA with the double stranded nucleic acid (or a conjugate comprising the double stranded nucleic acid). In some embodiments, the methods comprise delivering the double stranded nucleic acid into a cell (e.g., contacting the cell with the double stranded nucleic acid), for example a mammalian cell or human cell. In some embodiments, the cell is in a subject (e.g., a human subject).

[0111] The amount of inhibition or reduction of target mRNA may vary. In some embodiments, the target mRNA is reduced between about 50% and about 100% relative to the amount of target mRNA prior to the administration. In some embodiments, the target mRNA is reduced by about 50%, 60%, 70%, 80%, 90%, 95%, 99%, or 100% relative to the amount of target mRNA prior to the administration. In some embodiments, the target mRNA is reduced between about 5-fold and about 100-fold relative to the amount of target mRNA prior to the administration. In some embodiments, the target mRNA is reduced by about 5-fold, 10-fold, 20-fold, 50-fold, or 100-fold relative to the amount of target mRNA prior to the administration. In some embodiments, the target mRNA is SNCA mRNA. In some embodiments, the target mRNA is APOE mRNA.

[0112] Aspects of the disclosure relate to double stranded nucleic acids having certain patterns of 2′-F modifications (e.g., having antisense strands having 2′F-modified nucleotides at positions 2, 5, 7, 14, and 16; 2, 3, 7, 14, and 16; 2, 5, 8, 14, and 16; 2, 4, 6, 8, 14, and 16; or 2, 6, 8, 14, and 16, relative to the 5′ end of the antisense strand) that have increased durability in vivo relative to double stranded nucleic acids having other modification patterns. In some embodiments, increased durability refers to the persistence of knock down or gene silencing mediated by the double stranded nucleic acid. In some embodiments, increased durability refers to resistance to degradation (e.g., enzymatic degradation) of the double stranded nucleic acid in vivo. In some embodiments, a double stranded nucleic acid as described herein persists for about 10% to about 100% longer in vivo relative to a double stranded nucleic acid having a different pattern of modifications (or an unmodified double stranded nucleic acid). In some embodiments, a double stranded nucleic acid as described herein persists for about 50%, 60%, 70%, 80%, 90%, 95%, 99%, or 100% longer in vivo than a double stranded nucleic acid having a different pattern of modifications (or an unmodified double stranded nucleic acid). In some embodiments, a double stranded nucleic acid as described herein persists for about 5-fold and about 100-fold longer in vivo relative to a double stranded nucleic acid having a different pattern of modifications (or an unmodified double stranded nucleic acid). In some embodiments, a double stranded nucleic acid as described herein persists for about 5-fold, 10-fold, 20-fold, 50-fold, or 100-fold longer in vivo relative to a double stranded nucleic acid having a different pattern of modifications (or an unmodified double stranded nucleic acid).

[0113] Aspects of the disclosure relate to double stranded nucleic acids having reduced (or decreased) off-target effects relative to double stranded nucleic acids having a different pattern of modifications (or an unmodified double stranded nucleic acid). In some embodiments, the off-targeting is reduced between about 50% and about 100% relative to a double stranded nucleic acid having a different pattern of modifications (or an unmodified double stranded nucleic acid). In some embodiments, the off-targeting is reduced by about 20%, 30%, 40%, 50%, 60%, 70%, 80%, 90%, 95%, 99%, or 100% relative to a double stranded nucleic acid having a different pattern of modifications (or an unmodified double stranded nucleic acid). In some embodiments, the off-targeting is reduced between about 2-fold and about 100-fold relative to a double stranded nucleic acid having a different pattern of modifications (or an unmodified double stranded nucleic acid). In some embodiments, the off-targeting is reduced by about 2-fold, 5-fold, 10-fold, 20-fold, 50-fold, or 100-fold relative to a double stranded nucleic acid having a different pattern of modifications (or an unmodified double stranded nucleic acid).

[0114] In some aspects, the disclosure provides a method for treating a subject having or suspected of having a disease, disorder, or condition. In some embodiments, a subject is a human (and may also be referred to as a “patient”). Treatment of a subject involves administration of a composition to the subject (e.g., double stranded nucleic acids, conjugates, pharmaceutical compositions, etc.) as described herein. As used herein, “treatment” or “treating” refers to all processes wherein there may be a slowing, controlling, delaying, or stopping of the development or progression of the disorders or disease disclosed herein, or ameliorating disorder or disease symptoms, but does not necessarily indicate a total elimination of all disorder or disease symptoms. Treatment includes administration of a composition (e.g., double stranded nucleic acids, conjugates, pharmaceutical compositions, etc.) described herein for treatment of a disease or condition in a patient, particularly in a human. In some embodiments, administration of the double stranded nucleic acids descried herein is a prophylactic treatment of a subject who does not and did not have a disease but is at risk of developing the disease or who did have a disease, and is not with a disease, but is at risk of regression of the disease. In certain embodiments, the subject is at a higher risk of developing a disease or at a higher risk of regression of the disease relative to an average healthy member of a population.

[0115] “Development” or “progression” of a disease, disorder, or condition means initial manifestations and/or ensuing progression of the disease, disorder, or condition. Development of the disease, disorder, or condition can be detectable and assessed using standard clinical techniques as well known in the art. However, development also refers to progression that may be undetectable. For purpose of this disclosure, development or progression refers to the biological course of the symptoms.

[0116] The optimal course of administration or delivery of the compositions (e.g., double stranded nucleic acids, conjugates, pharmaceutical compositions, etc.) of the disclosure may vary depending upon the desired result and/or on the subject to be treated. As used herein “administration” refers to contacting cells with double stranded nucleic acids and preparations thereof and can be performed in vitro (including ex vivo) or in vivo. Compositions (e.g., double stranded nucleic acids, conjugates, pharmaceutical compositions, etc.) provided herein can be administered a number of routes including, but not limited to, by oral administration, intravenous administration (e.g., systemic intravenous injection/administration), intrathecal administration, subcutaneous administration, or intracisternal magna administration to the brain.

[0117] In general, the most appropriate route of administration will depend upon a variety of factors including the nature of the agent (e.g., its stability in the environment of the patient), and/or the condition of the subject (e.g., whether the subject is able to tolerate oral administration, injection, etc.). In some embodiments, compositions are administered to a subject through only one administration route. In some embodiments, multiple administration routes may be exploited (e.g., serially, or simultaneously) for administration of the composition to a subject.

[0118] In some embodiments, an effective amount (e.g., an amount sufficient to decrease expression or activity of a target mRNA) is administered to a subject. An “effective amount” refers to an amount necessary (for periods of time and for the means of administration) to achieve the desired therapeutic result. An effective amount may vary according to factors such as the disease state, age, sex, and weight of the individual, and the ability of the double stranded nucleic acid to elicit a desired response in the individual. An effective amount is also one in which any toxic or detrimental effects of administration are outweighed by the therapeutically beneficial effects. The effective amount will depend primarily on factors such as the species, age, weight, health of the subject, and the tissue to be targeted, and may thus vary among animal and tissue. In some embodiments, an effective amount can be a combination of an effective dosage, frequency, and duration for administration During the course of treatment, administration of a composition (e.g., double stranded nucleic acids, conjugates, pharmaceutical compositions, etc.) may be altered or adjusted accordingly. For example, expression of the target mRNA and/or the protein product encoded by the target mRNA may be monitored to inform methods of use of the composition. Expression information may be obtained, for example, through measuring changes in the levels of the protein or RNA products of the target mRNA.

### EXAMPLES

### Example 1: Synthesis of the RNAi Agent

[0119] Single strands (sense and antisense) of the RNA duplexes were synthesized on solid support via a MerMade™ 12 (LGC Biosearch Technologies). The sequences of the unmodified and modified sense and antisense strands were shown in Tables 1-4. The mRNA Target 1 (APOE) and mRNA Target 2 (SNCA) molecules are not encoded by the same gene. The oligonucleotides were synthesized via phosphoramidite chemistry. In some embodiments, a sense strand described in Table 2 or Table 4 comprises a delivery molecule, such as a lipid (e.g., the cholesterol ester, cholesteryl). In some embodiments, the delivery molecule (e.g., lipid) is attached to the sense strand via a linker, for example a TEG linker.

TABLE 1
Unmodified Nucleic Acid Sequences of
dsRNA Targeting APOE.

| | | | | | Start |
|---|---|---|---|---|---|
| | Sense | SEQ | Antisense | SEQ | Position |
| dsRNA | Strand | ID | Strand | ID | mRNA |
| No. | (5′ to 3′) | NO. | (5′ to 3′) | NO. | Target 1 |
| 1 | AGGUUCUGUGG | 1 | UCAACGCAGCCC | 5 | 74 |
| | GCUGCGUUGA | | ACAGAACCUUC | | |
| 2 | GGCUGCGUUGC | 2 | UAUGUGACCAGC | 6 | 84 |
| | UGGUCACAUA | | AACGCAGCCCA | | |
| 3 | GGCCUACAAAU | 3 | UCCAGUUCCGAU | 7 | 339 |
| | CGGAACUGGA | | UUGUAGGCCUU | | |
| 4 | AUGGACGAGAC | 4 | UUCCUUCAUGGU | 8 | 313 |
| | CAUGAAGGAA | | CUCGUCCAUCA | | |

TABLE 2
Modified Nucleic Acid Sequences of dsRNA Targeting APOE.

| dsRNA | Sense Strand | SEQ ID | Antisense Strand | SEQ |
|---|---|---|---|---|
| No. | (5′ to 3′) | NO. | (5′ to 3′) | ID NO. |
| 1 | mA*mG*mGmUmUmCfUmGfUfGf | 9 | mU*fC*mAmAmCfGmCmAmGmCmC | 43 |
| | GmGmCmUmGmCmGmUmU*mG* | | mCmAfCmAfGmAmAmCmCmU*mU* | |
| | mA | | mC | |
| 1 | mA*mG*mGmUmUmCfUmGfUfGf | 10 | mU*fC*mAmAfCmGmCmAmGmCmC | 44 |
| | GmGmCmUmGmCmGmUmU*mG* | | mCmAfCmAfGmAmAmCmCmU*mU* | |
| | mA | | mC | |
| 1 | mA*mG*mGmUmUmCfUmGfUfGf | 11 | mU*fC*mAfAmCmGmCmAmGmCmC | 45 |
| | GmGmCmUmGmCmGmUmU*mG* | | mCmAfCmAfGmAmAmCmCmU*mU* | |
| | mA | | mC | |
| 1 | mA*mG*mGmUmUmCfUmGfUfGf | 12 | mU*fC*mAmAmCmGfCmAmGmCmC | 46 |
| | GmGmCmUmGmCmGmUmU*mG* | | mCmAfCmAfGmAmAmCmCmU*mU* | |
| | mA | | mC | |
| 1 | mA*mG*mGmUmUmCfUmGfUfGf | 13 | mU*fC*fAmAmCmGfCmAmGmCmCm | 47 |
| | GmGmCmUmGmCmGmUmU*mG* | | CmAfCmAfGmAmAmCmCmU*mU*mC | |
| | mA | | | |
| 1 | mA*mG*mGmUmUmCfUmGfUfGf | 14 | mU*fC*mAmAfCmGfCmAmGmCmCm | 48 |
| | GmGmCmUmGmCmGmUmU*mG* | | CmAfCmAfGmAmAmCmCmU*mU*mC | |
| | mA | | | |
| 1 | mA*mG*mGmUmUmCmUmGfU | 15 | mU*fC*mAmAfCmGfCmAmGmCmC | 49 |
| | fGfGmGmCmUmGmCmGmU | | mCmAfCmAfGmAmAmCmC | |
| | mU*mG*mA | | mU*mU*mC | |
| 2 | mG*mG*mCmUmGmCfGmUfUfGfC | 16 | mU*fA*mUmGmUfGmAmCmCmAmG | 50 |
| | mUmGmGmUmCmAmCmA*mU*m | | mCmAfAmCfGmCmAmGmCmC*mC* | |
| | A | | mA | |
| 2 | mG*mG*mCmUmGmCfGmUfUfGfC | 17 | mU*fA*mUmGmUfGmAmCmCmAmG | 51 |
| | mUmGmGmUmCmAmCmA*mU*m | | mCmAfAmCfGmCmAmGmCmC*mC* | |
| | A | | mA | |
| 2 | mG*mG*mCmUmGmCfGmUfUfGfC | 18 | mU*fA*mUmGfUmGmAmCmCmAmG | 52 |
| | mUmGmGmUmCmAmCmA*mU*m | | mCmAfAmCfGmCmAmGmCmC*mC* | |
| | A | | mA | |
| 2 | mG*mG*mCmUmGmCfGmUfUfGfC | 19 | mU*fA*mUfGmUmGmAmCmCmAmG | 53 |
| | mUmGmGmUmCmAmCmA*mU*m | | mCmAfAmCfGmCmAmGmCmC*mC* | |
| | A | | mA | |
| 2 | mG*mG*mCmUmGmCfGmUfUfGfC | 20 | mU*fA*mUmGmUmGfAmCmCmAmG | 54 |
| | mUmGmGmUmCmAmCmA*mU*m | | mCmAfAmCfGmCmAmGmCmC*mC* | |
| | A | | mA | |
| 2 | mG*mG*mCmUmGmCfGmUfUfGfC | 21 | mU*fA*fUmGmUmGfAmCmCmAmGm | 55 |
| | mUmGmGmUmCmAmCmA*mU*m | | CmAfAmCfGmCmAmGmCmC*mC*mA | |
| | A | | | |
| 2 | mG*mG*mCmUmGmCfGmUfUfGfC | 22 | mU*fA*mUmGfUmGfAmCmCmAmGm | 56 |
| | mUmGmGmUmCmAmCmA*mU*m | | CmAfAmCfGmCmAmGmCmC*mC*mA | |
| | A | | | |
| 2 | mG*mG*mCmUmGmCfGmUfUfGfC | 23 | mU*fA*mUmGfUmGfAmCmCmAmGm | 57 |
| | mUmGmGmUmCmAmCmA*mU*m | | CmAfAmCfGmCmAmGmCmC*mC*mA | |
| | A | | | |
| 2 | mG*mG*mCmUmGmCfGmUfUfGfC | 24 | mU*fA*mUmGfUmGfAmCmCmAmGm | 58 |
| | mUmGmGmUmCmAmCmA*mU*m | | CmAfAmCfGmCmAmGmCmC*mC*mA | |
| | A | | | |
| 2 | mG*mG*mCmUmGmCmGmUfU | 25 | mU*fA*mUmGfUmGfAmCmCmAmG | 59 |
| | fGfCmUmGmGmUmCmAmC | | mCmAfAmCfGmCmAmGmC | |
| | mA*mU*mA | | mC*mC*mA | |
| 2 | mG*mG*mCmUmGmCmGmUfU | 26 | mU*fA*mUmGfUmGfAmCmCmAmG | 60 |
| | fGfCmUmGmGmUmCmAmC | | mCmAfAmCfGmCmAmGmC | |
| | mA*mU*mA | | mC*mC*mA | |
| 2 | mG*mG*mCmUmGmCfGmUfUfGfC | 27 | VPm5U*fA*mUmGmUfGmAmCmCmA | 61 |
| | mUmGmGmUmCmAmCmA*mU*m | | mGmCmAfAmCfGmCmAmGmCmC*m | |
| | A | | C*mA | |
| 2 | mG*mG*mCmUmGmCfGmUfUfGfC | 28 | VPm5U*fA*mUmGfUmGfAmCmCmA | 62 |
| | mUmGmGmUmCmAmCmA*mU*m | | mGmCmAfAmCfGmCmAmGmCmC*m | |
| | A | | C*mA | |
| 3 | mG*mG*mCmCmUmAfCmAfAfAfU | 29 | mU*fC*mCmAmGfUmUmCmCmGmA | 63 |
| | mCmGmGmAmAmCmUmG*mG*m | | mUmUfUmGfUmAmGmGmCmC*mU* | |
| | A | | mU | |
| 3 | mG*mG*mCmCmUmAfCmAfAfAfU | 30 | mU*fC*mCmAfGmUmUmCmCmGmA | 64 |
| | mCmGmGmAmAmCmUmG*mG*m | | mUmUfUmGfUmAmGmGmCmC*mU* | |
| | A | | mU | |
| 3 | mG*mG*mCmCmUmAfCmAfAfAfU | 31 | mU*fC*mCfAmGmUmUmCmCmGmA | 65 |
| | mCmGmGmAmAmCmUmG*mG*m | | mUmUfUmGfUmAmGmGmCmC*mU* | |
| | A | | mU | |
| 3 | mG*mG*mCmCmUmAfCmAfAfAfU | 32 | mU*fC*mCmAmGmUfUmCmCmGmA | 66 |
| | mCmGmGmAmAmCmUmG*mG*m | | mUmUfUmGfUmAmGmGmCmC*mU* | |
| | A | | mU | |
| 3 | mG*mG*mCmCmUmAfCmAfAfAfU | 33 | mU*fC*fCmAmGmUfUmCmCmGmAm | 67 |
| | mCmGmGmAmAmCmUmG*mG*m | | UmUfUmGfUmAmGmGmCmC*mU*m | |
| | A | | U | |
| 3 | mG*mG*mCmCmUmAfCmAfAfAfU | 34 | mU*fC*mCmAfGmUfUmCmCmGmAm | 68 |
| | mCmGmGmAmAmCmUmG*mG*m | | UmUfUmGfUmAmGmGmCmC*mU*m | |
| | AP | | U | |
| 3 | mG*mG*mCmCmUmAmCmAfA | 35 | mU*fC*mCmAfGmUfUmCmCmGmA | 69 |
| | fAfUmCmGmGmAmAmCmU | | mUmUfUmGfUmAmGmGmC | |
| | mG*mG*mA | | mC*mU*mU | |
| 4 | mA*mU*mGmGmAmCfGmAfGfAfC | 36 | mU*fU*mCmCmUfUmCmAmUmGmG | 70 |
| | mCmAmUmGmAmAmGmG*mA*m | | mUmCfUmCfGmUmCmCmAmU*mC* | |
| | A | | mA | |
| 4 | mA*mU*mGmGmAmCfGmAfGfAfC | 37 | mU*fU*mCmCfUmUmCmAmUmGmG | 71 |
| | mCmAmUmGmAmAmGmG*mA*m | | mUmCfUmCfGmUmCmCmAmU*mC* | |
| | A | | nA | |
| 4 | mA*mU*mGmGmAmCfGmAfGfAfC | 38 | mU*fU*mCfCmUmUmCmAmUmGmG | 72 |
| | mCmAmUmGmAmAmGmG*mA*m | | mUmCfUmCfGmUmCmCmAmU*mC* | |
| | A | | mA | |
| 4 | mA*mU*mGmGmAmCfGmAfGfAfC | 39 | mU*fU*mCmCmUmUfCmAmUmGmG | 73 |
| | mCmAmUmGmAmAmGmG*mA*m | | mUmCfUmCfGmUmCmCmAmU*mC* | |
| | A | | mA | |
| 4 | mA*mU*mGmGmAmCfGmAfGfAfC | 40 | mU*fU*fCmCmUmUfCmAmUmGmGm | 74 |
| | mCmAmUmGmAmAmGmG*mA*m | | UmCfUmCfGmUmCmCmAmU*mC*m | |
| | A | | A | |
| 4 | mA*mU*mGmGmAmCfGmAfGfAfC | 41 | mU*fU*mCmCfUmUfCmAmUmGmGm | 75 |
| | mCmAmUmGmAmAmGmG*mA*m | | UmCfUmCfGmUmCmCmAmU*mC*m | |
| | A | | A | |
| 4 | mA*mU*mGmGmAmCmGmAfG | 42 | mU*fU*mCmCfUmUfCmAmUmGmG | 76 |
| | fAfCmCmAmUmGmAmAmG | | mUmCfUmCfGmUmCmCmA | |
| | mG*mA*mA | | mU*mC*mA | |

Abbreviations - “m” indicates 2′-OMe; “f” indicates 2′-fluoro; “*” indicates a modified linkage (e.g., a phosphorothioate linkage); and “VP” indicates 5′-vinylphosphonate.

TABLE 3
Unmodified Nucleic Acid Sequences of dsRNA Targeting SNCA.

| | | | | | Start |
|---|---|---|---|---|---|
| | | | | | posi- |
| | | | | | tion |
| | | | | | of |
| | | | | | target |
| | | | | | region |
| | | | | | on |
| RNAi | | SEQ | Antisense | SEQ | mRNA |
| Agent | Sense Strand | ID | Strand | ID | Target |
| No. | (5′ to 3′) | NO | (5′ to 3′) | NO | 2 |
| 1 | CUGUACAAGUGCUCA | 77 | UGGAACUGAGCACUUG | 78 | 701 |
| | GUUCCA | | UACAGGA | | |
| 2 | CUGUACAAGUGCUCA | 145 | UGGAACTGAGCACUUG | 147 | |
| | GTUCCA | | UACAGGA | | |
| 3 | UGUACAAGUGCUCAG | 146 | UUGGAACUGAGCACUU | 148 | |
| | UUCCAA | | GUACAG | | |
| 4 | UGUACAAGUGCUCAG | 146 | UUGGACUGAGCACUUG | 149 | |
| | UUCCAA | | UACAGG | | |
| 5 | UGUACAAGUGCUCAG | 146 | UUGGAAUGAGCACUUG | 150 | |
| | UUCCAA | | UACAGG | | |
| 39 | UGUACAAGUGCUCAG | 146 | UUGGAACGAGCACUUG | 151 | |
| | UUCCAA | | UACAGG | | |

TABLE 4
Modified Nucleic Acid Sequences of dsRNA Targeting SNCA

| dsRNA | | SEQ ID | Antisense Strand | SEQ ID |
|---|---|---|---|---|
| No. | Sense Strand (5′ to 3′) | NO. | (5′ to 3′) | NO. |
| 6 | mC*mU*mGmUmAmCfAmAfG(Ab)fG | 79 | VPmU*fG*mGmAmAfCmUmGmA | 112 |
| | mCmUmCmAmGmUmUmC*mC*mA | | mGmCmAmCfUmUfGmUmAmCm | |
| | | | AmG*mG*mA | |
| 6 | mC*mU*mGmUmAmCfAmArG(Ab)rG | 80 | VPmU*fG*mGmAfAmCmUfGmA | 113 |
| | mCmUmCmAmGmUmUmC*mC*mA | | mGmCmAmCfUmUfGmUmAmCm | |
| | | | AmG*mG*mA | |
| 6 | mC*mU*mGmUmAmCfAmAfG(Ab)fG | 81 | VPmU*fG*mGfAmAfCfUmGfAmG | 114 |
| | mCmUmCmAmGmUmUmC*mC*mA | | mCmAmCfUmUfGmUmAmCmAm | |
| | | | G*mG*mA | |
| 7 | mC*mU*mGmUmAmCfAmAfGfUfGm | 82 | VPmU*fG*mGmAfAfCfUfGmAmG | 115 |
| | CmUmCmAmGmUmUmC*mC*mA | | mCmAmCfUmUfGmUmAmCmAm | |
| | | | G*mG*mA | |
| 7 | mC*mU*mGmUmAmCfAmAfGfUfGm | 83 | VPmU*fG*mGmAmAmCmUmGm | 116 |
| | CmUmCmAmGmUmUmC*mC*mA | | AmGmCmAmCfUmUfGmUmAmC | |
| | | | mAmG*mG*mA | |
| 7 | mC*mU*mGmUmAmCfAmAfGfUfGm | 84 | VPmU*fG*mGmAfAmCmUfGmA | 117 |
| | CmUmCmAmGmUmUmC*mC*mA | | mGmCmAmCfUmUfGmUmAmCm | |
| | | | AmG*mG*mA | |
| 7 | mC*mU*mGmUmAmCfAmAfGfUfGm | 85 | VPmU*fG*mGmAfAmCmUmGmA | 118 |
| | CmUmCmAmGmUmUmC*mC*mA | | mGmCmAmCfUmUfGmUmAmCm | |
| | | | AmG*mG*mA | |
| 7 | mC*mU*mGmUmAmCfAmAfGfUfGm | 86 | VPmU*fG*mGmAmAfCmUmGmA | 119 |
| | CmUmCmAmGmUmUmC*mC*mA | | mGmCmAmCfUmUfGmUmAmCm | |
| | | | AmG*mG*mA | |
| 7 | mC*mU*mGmUmAmCfAmAfGUfGm | 87 | VPmU*fG*mGmAmAfCmUmGmA | 120 |
| | CmUmCmAmGmUmUmC*mC*mA | | mGmCmAmCfUmUfGmUmAmCm | |
| | | | AmG*mG*mA | |
| 7 | mC*mU*mGmUmAmCAmAfGfUfGm | 88 | VPmU*fG*mGmAmAfCmUmGmA | 121 |
| | CmUmCmAmGmUmUmC*mC*mA | | mGmCmAmCfUmUfGmUmAmCm | |
| | | | AmG*mG*mA | |
| 7 | mC*mU*mGmUmAmCfAmAfGfUfGm | 89 | VPmU*fG*mGmAmAfCmUmGmA | 122 |
| | CmUmCmAmGmUmUmC*mC*mG | | mGmCmAmCfUmUfGmUmAmCm | |
| | | | AmG*mG*mA | |
| 7 | mC*mU*mGmUmAmCfAmAfGfUfGm | 90 | VPmU*fG*mGfAmAmCmUmGmA | 123 |
| | CmUmCmAmGmUmUmC*mC*mA | | mGmCmAmCfUmUfGmUmAmCm | |
| | | | AmG*mG*mA | |
| 7 | mC*mU*mGmUmAmCmAmAfGfUfG | 91 | VPmU*fG*mGmAmAfCmUmGmA | 124 |
| | mCmUmCmAmGmUmUmC*mC*mA | | mGmCmAmCfUmUfGmUmAmCm | |
| | | | AmG*mG*mA | |
| 7 | fC*mU*fGmUfAmCfAmAfGfUfGm | 92 | VPmU*fG*mGmAmAfCmUmGmA | 125 |
| | CfUmCfAmGfUmUfC*mC*fA | | mGmCmAmCfUmUfGmUmAmCm | |
| | | | AmG*mG*mA | |
| 7 | mC*mU*mGmUmAmCfAmAfGfUfGm | 93 | VPmU*fG*mGfAmAfCmUfGmAm | 126 |
| | CmUmCmAmGmUmUmC*mC*mA | | GmCmAmCfUmUfGmUmAmCmA | |
| | | | mG*mG*mA | |
| 7 | mC*mU*mGmUmAmCfAmAfGfUfGm | 94 | VPmU*fG*mGmAmAfCmUfGmA | 127 |
| | CmUmCmAmGmUmUmC*mC*mA | | mGmCmAmCfUmUfGmUmAmCm | |
| | | | AmG*mG*mA | |
| 7 | mC*mU*mGmUmAmCfAmAfGfUfGm | 95 | VPmU*fG*mGmAmAfCmUmGmA | 128 |
| | CmUmCmAmGmTmUmC*mC*mA | | mGmCmAmCfUmUfGmUmAmCm | |
| | | | AmG*mG*mA | |
| 7 | mC*mU*mGmUmAmCfAmAfGfUfGm | 96 | VPmU*fG*mGfAmAfCmUfGmAfG | 129 |
| | CmUmCmAmGmUmUmC*mC*mA | | mCmAmCfUmUfGmUfAmCfAmG* | |
| | | | mG*mA | |
| 7 | mC*mU*mGmUmAmCrAmAfGrUfG | 97 | VPmU*fG*mGmAfAmCmUfGmA | 130 |
| | mCmUmCmAmGmUmUmC*mC*mA | | mGmCmAmCfUmUfGmUmAmCm | |
| | | | AmG*mG*mA | |
| 7 | mC*mU*mGmUmAmCmAmAfG(rU)f | 98 | VPmU*fG*mGmAfAmCmUfGmA | 131 |
| | GmCmUmCmAmGmUmUmC*mC*m | | mGmCmAmCfUmUfGmUmAmCm | |
| | A | | AmG*mG*mA | |
| 7 | mC*mU*mGmUmAmCfAmAfGfUrGm | 99 | VPmU*fG*mGmAfAmCmUfGmA | 132 |
| | CmUmCmAmGmUmUmC*mC*mA | | mGmCmAmCfUmUfGmUmAmCm | |
| | | | AmG*mG*mA | |
| 8 | mA*mC*fAmAfGfUfGmCmUmCmAm | 100 | VPmU*fG*mGmAmAfCmUmGmA | 133 |
| | GmUmUmC*mC*mA | | mGmCmAmCfUmUfGmUmAmCm | |
| | | | AmG*mG*mA | |
| 9 | mC*mG*mGmUmAmCfAmAfGfUfGm | 101 | VPmU*fG*mGmAmAfCmUmGmA | 134 |
| | CmUmCmAmGmUmUmC*mC*mA | | mGmCmAmCfUmUfGmUmAmCm | |
| | | | AmU*mG*mA | |
| 10 | mC*mU*mGmUmAmCfAmA(Ab)fUfG | 102 | VPmU*fG*mGmAfAmCmUfGmA | 135 |
| | mCmUmCmAmGmUmUmC*mC*mA | | mGmCmAmCfUmUfGmUmAmCm | |
| | | | AmG*mG*mA | |
| 11 | mC*mU*mGmUmAmCfAmAfGfU(Ab) | 103 | VPmU*fG*mGmAfAmCmUfGmA | 136 |
| | mCmUmCmAmGmUmUmC*mC*mA | | mGmCmAmCfUmUfGmUmAmCm | |
| | | | AmG*mG*mA | |
| 12 | mC*mU*mGmUmAmCfAmAfG(Ab)fG | 104 | VPmU*fG*mGmAmAmCmUmGm | 137 |
| | mCmUmCmAmGmUmUmC*mC*mA | | AmGmCmAmCfUmUfGmUmAmC | |
| | | | mAmG*mG*mA | |
| 12 | mC*mU*mGmUmAmCfAmAfG(Ab)fG | 105 | VPmU*fG*mGmAfAmCfUmGmA | 138 |
| | mCmUmCmAmGmUmUmC*mC*mA | | mGmCmAmCfUmUfGmUmAmCm | |
| | | | AmG*mG*mA | |
| 12 | mC*mU*mGmUmAmCfAmAfG(Ab)fG | 106 | VPmU*fG*mGmAfAmCmUfGmA | 139 |
| | mCmUmCmAmGmUmUmC*mC*mA | | mGmCmAmCfUmUfGmUmAmCm | |
| | | | AmG*mG*mA | |
| 12 | mC*mU*mGmUmAmCfAmAfG(Ab)fG | 107 | VPmU*fG*fGmAmAmCfUmGmA | 140 |
| | mCmUmCmAmGmUmUmC*mC*mA | | mGmCmAmCfUmUfGmUmAmCm | |
| | | | AmG*mG*mA | |
| 12 | mC*mU*mGmUmAmCmAmAfG(Ab)f | 108 | VPmU*fG*mGmAfAmCmUfGmA | 141 |
| | GmCmUmCmAmGmUmUmC*mC*m | | mGmCmAmCfUmUfGmUmAmCm | |
| | A | | AmG*mG*mA | |
| 12 | mC*mU*mGmUmAmCrAmAfG(Ab)fG | 109 | VPmU*fG*mGmAfAmCmUfGmA | 142 |
| | mCmUmCmAmGmUmUmC*mC*mA | | mGmCmAmCfUmUfGmUmAmCm | |
| | | | AmG*mG*mA | |
| 13 | mG*mU*mAmCrAmAfG(Ab)fGmCmU | 110 | VPmU*fG*mGmAfAmCmUfGmA | 143 |
| | mCmAmGmUmUmC*mC*mA | | mGmCmAmCfUmUfGmUmAmCm | |
| | | | A*mG*mG*mA | |
| 14 | mA*mC*rAmAfG(Ab)fGmCmUmCmA | 111 | VPmU*fG*mGmAfAmCmUfGmA | 144 |
| | mGmUmUmC*mC*mA | | mGmCmAmCfUmUfGmUmAmCm | |
| | | | A*mG*mG*mA | |
| 15 | mU*mG*mUmAmCmAfAmGfUfGfCm | 152 | VPmU*fU*mGmGmAfAmCmUmG | 176 |
| | UmCmAmGmUmUmCmC*mA*mA | | mAmGmCmAfCmUfUmGmUmAm | |
| | | | CmA*mG*mG | |
| 16 | mU*mG*mUmAmCmAfAmGfUfGfCm | 153 | VPmU*fU*mGmGmAfAmCmUmG | 177 |
| | UmCmAmGmUmUmCmC*mA*mA | | mAmGmCmAfCmUfUmGmUmAm | |
| | | | CmA*mG*mG | |
| 17 | mU*mG*mUmAmCmAmAmGfUfGfC | 154 | VPmU*fU*mGmGfAmAmCfUmG | 178 |
| | mUmCmAmGmUmUmCmC*mA*mA | | mAmGmCmAfCmUfUmGmUmAm | |
| | | | CmA*mG*mG | |
| 18 | mU*mG*mUmAmCmAmAmGfUfGfC | 155 | VPmU*fU*mGmGfAmAmCfUmG | 179 |
| | mUmCmAmGmUmUmCmC*mA*mA | | mAmGmCmAfCmUfUmGmUmAm | |
| | P | | CmA*mG*mG | |
| 19 | mU*mG*mUmAmCmAmAmGfUfGfC | 156 | VPmU*fU*mGmGfAmAmCfUmG | 180 |
| | mUmCmAmGmUmUmCmC*mA*mA | | mAmGmCmAfCmUfUmGmUmAm | |
| | | | CmA*mG*mG | |
| 20 | mU*mG*mUmAmCmAmAmGfUfGfC | 157 | VPmU*fU*mGmGfAmAmCfUmG | 181 |
| | mUmCmAmGmUmUmCmC*mA*mA | | mAmGmCmAfCmUfUmGmUmAm | |
| | | | C*mA*mG | |
| 21 | mU*mG*mUmAmCmAmAmGfUfGfC | 158 | VPmU*fU*mGmG(Ab)mAmCfUm | 182 |
| | mUmCmAmGmUmUmCmC*mA*mA | | GmAmGmCmAfCmUfUmGmUmA | |
| | | | mCmA*mG*mG | |
| 22 | mU*mG*mUmAmCmAmAmGfUfGfC | 159 | VPmU*fU*mGmGfA(Ab)mCfUmG | 183 |
| | mUmCmAmGmUmUmCmC*mA*mA | | mAmGmCmAfCmUfUmGmUmAm | |
| | | | CmA*mG*mG | |
| 23 | mU*mG*mUmAmCmAmAmGfUfGfC | 160 | VPmU*fU*mGmGfAmA(Ab)fUmG | 184 |
| | mUmCmAmGmUmUmCmC*mA*mA | | mAmGmCmAfCmUfUmGmUmAm | |
| | | | CmA*mG*mG | |
| 24 | mU*mG*mUmAmCmAmAmGfUfGfC | 161 | VPmU*fU*mGmGfAmAmC(Ab)m | 185 |
| | mUmCmAmGmUmUmCmC*mA*mA | | GmAmGmCmAfCmUfUmGmUmA | |
| | | | mCmA*mG*mG | |
| 25 | mU*mG*mUmAmCmAmAmGfUfGfC | 162 | VPmU*fU*mGmG(Ab)mAmCfUm | 186 |
| | mUmCmAmGmUmUmCmC*mA*mA | | GmAmGmCmAfCmUfUmGmUmA | |
| | | | mCmA*mG*mG | |
| 26 | mU*mG*mUmAmCmAmAmGfUfGfC | 163 | VPmU*fU*mGmGfA(Ab)mCfUmG | 187 |
| | mUmCmAmGmUmUmCmC*mA*mA | | mAmGmCmAfCmUfUmGmUmAm | |
| | | | CmA*mG*mG | |
| 27 | mU*mG*mUmAmCmAmAmGfUfGfC | 164 | VPmU*fU*mGmGfAmA(Ab)fUmG | 188 |
| | mUmCmAmGmUmUmCmC*mA*mA | | mAmGmCmAfCmUfUmGmUmAm | |
| | | | CmA*mG*mG | |
| 28 | mU*mG*mUmAmCmAmAmGfUfGfC | 165 | VPmU*fU*mGmGfAmAmC(Ab)m | 189 |
| | mUmCmAmGmUmUmCmC*mA*mA | | GmAmGmCmAfCmUfUmGmUmA | |
| | | | mCmA*mG*mG | |
| 29 | mC*mU*mGmUmAmCfAmAfGfUfGm | 166 | VPmU*fG*mGmAmAfCmUmGmA | 190 |
| | CmUmCmAmGmUmUmC*mC*mA | | mGmCmAmCfUmUfGmUmAmCm | |
| | | | AmG*mG*mA | |
| 30 | mC*mU*mGmUmAmCfAmAfGfUfGm | 167 | VPmU*fG*mGmAmAfCmUmGmA | 191 |
| | CmUmCmAmGmUmUmC*mC*mA | | mGmCmAmCfUmUfGmUmAmCm | |
| | | | AmG*mG*mA | |
| 31 | mC*mU*mGmUmAmCmAmAfGfUfG | 168 | VPmU*fG*mGmAfAmCmUfGmA | 192 |
| | mCmUmCmAmGmUmUmC*mC*mA | | mGmCmAmCfUmUfGmUmAmCm | |
| | | | AmG*mG*mA | |
| 32 | mC*mU*mGmUmAmCmAmAfGfUfG | 169 | VPmU*fG*mGmAfAmCfUmGmA | 193 |
| | mCmUmCmAmGmUmUmC*mC*mA | | mGmCmAmCfUmUfGmUmAmCm | |
| | | | AmG*mG*mA | |
| 33 | mC*mU*mGmUmAmCmAmAfGfUfG | 170 | VPmU*fG*mGmAfAmCmUfGmA | 194 |
| | mCmUmCmAmGmUmUmC*mC*mA | | mGmCmAmCfUmUfGmUmAmCm | |
| | | | AmG*mG*mA | |
| 34 | mC*mU*mGmUmAmCmAmAfGfUfG | 171 | VPmU*fG*mGmAfAmCmUfGmA | 195 |
| | mCmUmCmAmGmUmUmC*mC*mA | | mGmCmAmCfUmUfGmUmAmCm | |
| | | | AmG*mG*mA | |
| 35 | mC*mU*mGmUmAmCmAmAfGfUfG | 172 | VPmU*fG*mGmAmAmCmUmGm | 196 |
| | mCmUmCmAmGmUmUmC*mC*mA | | AmGmCmAmCfUmUfGmUmAmC | |
| | | | mAmG*mG*mA | |
| 36 | mC*mU*mGmUmAmCmAmAfGfUfG | 173 | VPmU*fG*mGdAfAmCdTfGmAm | 197 |
| | mCmUmCdAmGdTmUmC*mC*mA | | GmCmAmCfUmUfGmUmAmCmA | |
| | | | mG*mG*mA | |
| 37 | mC*mU*mGmUmAmCmAmAfGfUfG | 174 | VPmU*fG*mGmAfAmC*mUfGmA | 198 |
| | mCmUmCmAmGmUmUmC*mC*mA | | mGmCmAmCfUmUfGmUmAmCm | |
| | | | AmG*mG*mA | |
| 38 | mC*mU*mGmUmAmCmAmAfGfUfG | 175 | VPmU*fG*mGmAfA*mCmUfGmA | 199 |
| | mCmUmCmAmGmUmUmC*mC*mA | | mGmCmAmCfUmUfGmUmAmCm | |
| | | | AmG*mG*mA | |

Abbreviations-“m” indicates 2′-OMe; “f” indicates 2′-fluoro; “*” indicates a modified linkage (e.g., a phosphorothioate linkage); “VP” indicates 5′-vinylphosphonate; “(Ab)” indicates abasic moiety. “r” indicates a position comprising a ribose sugar; and “d” indicates a position comprising a deoxyribose sugar.

TABLE 5
Conjugates Comprising Modified Nucleic Acid Sequences of dsRNA Targeting
SNCA.

| dsRNA | | SEQ ID | | SEQ ID |
|---|---|---|---|---|
| No. | Sense Strand (5′ to 3′) | NO. | Antisense Strand (5′ to 3′) | NO. |
| 6 | mC*mU*mGmUmAmCfAmAfG(Ab)fG | 79 | VPmU*fG*mGmAmAfCmUmGmA | 112 |
| | mCmUmCmAmGmUmUmC*mC*mA[ | | mGmCmAmCfUmUfGmUmAmCm | |
| | TEG-Tocopherol] | | AmG*mG*mA | |
| 6 | mC*mU*mGmUmAmCfAmArG(Ab)rG | 80 | VPmU*fG*mGmAfAmCmUfGmA | 113 |
| | mCmUmCmAmGmUmUmC*mC*mA | | mGmCmAmCfUmUfGmUmAmCm | |
| | [TEG-Tocopherol] | | AmG*mG*mA | |
| 6 | mC*mU*mGmUmAmCfAmAfG(Ab)fG | 81 | VPmU*fG*mGfAmAfCfUmGfAmG | 114 |
| | mCmUmCmAmGmUmUmC*mC*mA | | mCmAmCfUmUfGmUmAmCmAm | |
| | [TEG-Tocopherol] | | G*mG*mA | |
| 7 | mC*mU*mGmUmAmCfAmAfGfUfGm | 82 | VPmU*fG*mGmAfAfCfUfGmAmG | 115 |
| | CmUmCmAmGmUmUmC*mC*mA[T | | mCmAmCfUmUfGmUmAmCmAm | |
| | EG-Tocopherol] | | G*mG*mA | |
| 7 | mC*mU*mGmUmAmCfAmAfGfUfGm | 83 | VPmU*fG*mGmAmAmCmUmGm | 116 |
| | CmUmCmAmGmUmUmC*mC*mA[T | | AmGmCmAmCfUmUfGmUmAmC | |
| | EG-Tocopherol] | | mAmG*mG*mA | |
| 7 | mC*mU*mGmUmAmCfAmAfGfUfGm | 84 | VPmU*fG*mGmAfAmCmUfGmA | 117 |
| | CmUmCmAmGmUmUmC*mC*mA[T | | mGmCmAmCfUmUfGmUmAmCm | |
| | EG-Tocopherol] | | AmG*mG*mA | |
| 7 | mC*mU*mGmUmAmCfAmAfGfUfGm | 85 | VPmU*fG*mGmAfAmCmUmGmA | 118 |
| | CmUmCmAmGmUmUmC*mC*mA[T | | mGmCmAmCfUmUfGmUmAmCm | |
| | EG-Tocopherol] | | AmG*mG*mA | |
| 7 | mC*mU*mGmUmAmCfAmAfGfUfGm | 86 | VPmU*fG*mGmAmAfCmUmGmA | 119 |
| | CmUmCmAmGmUmUmC*mC*mA[T | | mGmCmAmCfUmUfGmUmAmCm | |
| | EG-Tocopherol] | | AmG*mG*mA | |
| 7 | mC*mU*mGmUmAmCfAmAfGUfGm | 87 | VPmU*fG*mGmAmAfCmUmGmA | 120 |
| | CmUmCmAmGmUmUmC*mC*mA[T | | mGmCmAmCfUmUfGmUmAmCm | |
| | EG-Tocopherol] | | AmG*mG*mA | |
| 7 | mC*mU*mGmUmAmCAmAfGfUfGm | 88 | VPmU*fG*mGmAmAfCmUmGmA | 121 |
| | CmUmCmAmGmUmUmC*mC*mA[T | | mGmCmAmCfUmUfGmUmAmCm | |
| | EG-Tocopherol] | | AmG*mG*mA | |
| 7 | mC*mU*mGmUmAmCfAmAfGfUfGm | 89 | VPmU*fG*mGmAmAfCmUmGmA | 122 |
| | CmUmCmAmGmUmUmC*mC*mG[T | | mGmCmAmCfUmUfGmUmAmCm | |
| | EG-Tocopherol] | | AmG*mG*mA | |
| 7 | mC*mU*mGmUmAmCfAmAfGfUfGm | 90 | VPmU*fG*mGfAmAmCmUmGmA | 123 |
| | CmUmCmAmGmUmUmC*mC*mA[T | | mGmCmAmCfUmUfGmUmAmCm | |
| | EG-Tocopherol] | | AmG*mG*mA | |
| 7 | mC*mU*mGmUmAmCmAmAfGfUfG | 91 | VPmU*fG*mGmAmAfCmUmGmA | 124 |
| | mCmUmCmAmGmUmUmC*mC*mA[ | | mGmCmAmCfUmUfGmUmAmCm | |
| | TEG-Tocopherol] | | AmG*mG*mA | |
| 7 | fC*mU*fGmUfAmCfAmAfGfUfGmCfU | 92 | VPmU*fG*mGmAmAfCmUmGmA | 125 |
| | mCfAmGfUmUfC*mC*fA[TEG- | | mGmCmAmCfUmUfGmUmAmCm | |
| | Tocopherol] | | AmG*mG*mA | |
| 7 | mC*mU*mGmUmAmCfAmAfGfUfGm | 93 | VPmU*fG*mGfAmAfCmUfGmAm | 126 |
| | CmUmCmAmGmUmUmC*mC*mA[T | | GmCmAmCfUmUfGmUmAmCmA | |
| | EG-Tocopherol] | | mG*mG*mA | |
| 7 | mC*mU*mGmUmAmCfAmAfGfUfGm | 94 | VPmU*fG*mGmAmAfCmUfGmA | 127 |
| | CmUmCmAmGmUmUmC*mC*mA[T | | mGmCmAmCfUmUfGmUmAmCm | |
| | EG-Tocopherol] | | AmG*mG*mA | |
| 7 | mC*mU*mGmUmAmCfAmAfGfUfGm | 95 | VPmU*fG*mGmAmAfCmUmGmA | 128 |
| | CmUmCmAmGmTmUmC*mC*mA[TE | | mGmCmAmCfUmUfGmUmAmCm | |
| | G-Tocopherol] | | AmG*mG*mA | |
| 7 | mC*mU*mGmUmAmCfAmAfGfUfGm | 96 | VPmU*fG*mGfAmAfCmUfGmAfG | 129 |
| | CmUmCmAmGmUmUmC*mC*mA[T | | mCmAmCfUmUfGmUfAmCfAmG* | |
| | EG-Tocopherol] | | mG*mA | |
| 7 | mC*mU*mGmUmAmCrAmAfGrUfG | 97 | VPmU*fG*mGmAfAmCmUfGmA | 130 |
| | mCmUmCmAmGmUmUmC*mC*mA | | mGmCmAmCfUmUfGmUmAmCm | |
| | [TEG-Tocopherol] | | AmG*mG*mA | |
| 7 | mC*mU*mGmUmAmCmAmAfG(rU)f | 98 | VPmU*fG*mGmAfAmCmUfGmA | 131 |
| | GmCmUmCmAmGmUmUmC*mC*m | | mGmCmAmCfUmUfGmUmAmCm | |
| | A [TEG-Tocopherol] | | AmG*mG*mA | |
| 7 | mC*mU*mGmUmAmCfAmAfGfUrGm | 99 | VPmU*fG*mGmAfAmCmUfGmA | 132 |
| | CmUmCmAmGmUmUmC*mC*mA | | mGmCmAmCfUmUfGmUmAmCm | |
| | [TEG-Tocopherol] | | AmG*mG*mA | |
| 8 | mA*mC*fAmAfGfUfGmCmUmCmAm | 100 | VPmU*fG*mGmAmAfCmUmGmA | 133 |
| | GmUmUmC*mC*mA[TEG- | | mGmCmAmCfUmUfGmUmAmCm | |
| | Tocopherol] | | AmG*mG*mA | |
| 9 | mC*mG*mGmUmAmCfAmAfGfUfGm | 101 | VPmU*fG*mGmAmAfCmUmGmA | 134 |
| | CmUmCmAmGmUmUmC*mC*mA[T | | mGmCmAmCfUmUfGmUmAmCm | |
| | EG-Tocopherol] | | AmU*mG*mA | |
| 10 | mC*mU*mGmUmAmCfAmA(Ab)fUfG | 102 | VPmU*fG*mGmAfAmCmUfGmA | 135 |
| | mCmUmCmAmGmUmUmC*mC*mA | | mGmCmAmCfUmUfGmUmAmCm | |
| | [TEG-Tocopherol] | | AmG*mG*mA | |
| 11 | mC*mU*mGmUmAmCfAmAfGfU(Ab) | 103 | VPmU*fG*mGmAfAmCmUfGmA | 136 |
| | mCmUmCmAmGmUmUmC*mC*mA | | mGmCmAmCfUmUfGmUmAmCm | |
| | [TEG-Tocopherol] | | AmG*mG*mA | |
| 12 | mC*mU*mGmUmAmCfAmAfG(Ab)fG | 104 | VPmU*fG*mGmAmAmCmUmGm | 137 |
| | mCmUmCmAmGmUmUmC*mC*mA | | AmGmCmAmCfUmUfGmUmAmC | |
| | [TEG-Tocopherol] | | mAmG*mG*mA | |
| 12 | mC*mU*mGmUmAmCfAmAfG(Ab)fG | 105 | VPmU*fG*mGmAfAmCfUmGmA | 138 |
| | mCmUmCmAmGmUmUmC*mC*mA | | mGmCmAmCfUmUfGmUmAmCm | |
| | [TEG-Tocopherol] | | AmG*mG*mA | |
| 12 | mC*mU*mGmUmAmCfAmAfG(Ab)fG | 106 | VPmU*fG*mGmAfAmCmUfGmA | 139 |
| | mCmUmCmAmGmUmUmC*mC*mA | | mGmCmAmCfUmUfGmUmAmCm | |
| | [TEG-Tocopherol] | | AmG*mG*mA | |
| 12 | mC*mU*mGmUmAmCfAmAfG(Ab)fG | 107 | VPmU*fG*fGmAmAmCfUmGmA | 140 |
| | mCmUmCmAmGmUmUmC*mC*mA | | mGmCmAmCfUmUfGmUmAmCm | |
| | [TEG-Tocopherol] | | AmG*mG*mA | |
| 12 | mC*mU*mGmUmAmCmAmAfG(Ab)f | 108 | VPmU*fG*mGmAfAmCmUfGmA | 141 |
| | GmCmUmCmAmGmUmUmC*mC*m | | mGmCmAmCfUmUfGmUmAmCm | |
| | A [TEG-Tocopherol] | | AmG*mG*mA | |
| 12 | mC*mU*mGmUmAmCrAmAfG(Ab)fG | 109 | VPmU*fG*mGmAfAmCmUfGmA | 142 |
| | mCmUmCmAmGmUmUmC*mC*mA | | mGmCmAmCfUmUfGmUmAmCm | |
| | [TEG-Tocopherol] | | AmG*mG*mA | |
| 13 | mG*mU*mAmCrAmAfG(Ab)fGmCmU | 110 | VPmU*fG*mGmAfAmCmUfGmA | 143 |
| | mCmAmGmUmUmC*mC*mA[TEG- | | mGmCmAmCfUmUfGmUmAmCm | |
| | Tocopherol] | | A*mG*mG*mA | |
| 14 | mA*mC*rAmAfG(Ab)fGmCmUmCmA | 111 | VPmU*fG*mGmAfAmCmUfGmA | 144 |
| | mGmUmUmC*mC*mA[TEG- | | mGmCmAmCfUmUfGmUmAmCm | |
| | Tocopherol] | | A*mG*mG*mA | |
| 15 | mU*mG*mUmAmCmAfAmGfUfGfCm | 152 | VPmU*fU*mGmGmAfAmCmUmG | 176 |
| | UmCmAmGmUmUmCmC*mA*mA[T | | mAmGmCmAfCmUfUmGmUmAm | |
| | EG-Tocopherol] | | CmA*mG*mG | |
| 17 | mU*mG*mUmAmCmAmAmGfUfGfC | 154 | VPmU*fU*mGmGfAmAmCfUmG | 178 |
| | mUmCmAmGmUmUmCmC*mA*mA[ | | mAmGmCmAfCmUfUmGmUmAm | |
| | TEG-Cholesterol] | | CmA*mG*mG | |
| 18 | mU*mG*mUmAmCmAmAmGfUfGfC | 155 | VPmU*fU*mGmGfAmAmCfUmG | 179 |
| | mUmCmAmGmUmUmCmC*mA*mA | | mAmGmCmAfCmUfUmGmUmAm | |
| | P[TEG-Cholesterol] | | CmA*mG*mG | |
| 20 | mU*mG*mUmAmCmAmAmGfUfGfC | 157 | VPmU*fU*mGmGfAmAmCfUmGm | 181 |
| | mUmCmAmGmUmUmCmC*mA*mA[ | | AmGmCmAfCmUfUmGmUmAmC* | |
| | TEG-Tocopherol] | | mA*mG | |
| 25 | mU*mG*mUmAmCmAmAmGfUfGfC | 162 | VPmU*fU*mGmG(Ab)mAmCfUm | 186 |
| | mUmCmAmGmUmUmCmC*mA*mA[ | | GmAmGmCmAfCmUfUmGmUmA | |
| | TEG-Cholesterol] | | mCmA*mG*mG | |
| 26 | mU*mG*mUmAmCmAmAmGfUfGfC | 163 | VPmU*fU*mGmGfA(Ab)mCfUmG | 187 |
| | mUmCmAmGmUmUmCmC*mA*mA[ | | mAmGmCmAfCmUfUmGmUmAm | |
| | TEG-Cholesterol] | | CmA*mG*mG | |
| 27 | mU*mG*mUmAmCmAmAmGfUfGfC | 164 | VPmU*fU*mGmGfAmA(Ab)fUmG | 188 |
| | mUmCmAmGmUmUmCmC*mA*mA[ | | mAmGmCmAfCmUfUmGmUmAm | |
| | TEG-Cholesterol] | | CmA*mG*mG | |
| 28 | mU*mG*mUmAmCmAmAmGfUfGfC | 165 | VPmU*fU*mGmGfAmAmC(Ab)m | 189 |
| | mUmCmAmGmUmUmCmC*mA*mA[ | | GmAmGmCmAfCmUfUmGmUmA | |
| | TEG-Cholesterol] | | mCmA*mG*mG | |
| 30 | mC*mU*mGmUmAmCfAmAfGfUfGm | 167 | VPmU*fG*mGmAmAfCmUmGmA | 191 |
| | CmUmCmAmGmUmUmC*mC*mA[T | | mGmCmAmCfUmUfGmUmAmCm | |
| | EG-Cholesterol] | | AmG*mG*mA | |
| 31 | mC*mU*mGmUmAmCmAmAfGfUfG | 168 | VPmU*fG*mGmAfAmCmUfGmA | 192 |
| | mCmUmCmAmGmUmUmC*mC*mA[ | | mGmCmAmCfUmUfGmUmAmCm | |
| | TEG-Cholesterol] | | AmG*mG*mA | |
| 32 | mC*mU*mGmUmAmCmAmAfGfUfG | 169 | VPmU*fG*mGmAfAmCfUmGmA | 193 |
| | mCmUmCmAmGmUmUmC*mC*mA[ | | mGmCmAmCfUmUfGmUmAmCm | |
| | TEG-Cholesterol] | | AmG*mG*mA | |
| 34 | mC*mU*mGmUmAmCmAmAfGfUfG | 171 | VPmU*fG*mGmAfAmCmUfGmA | 195 |
| | mCmUmCmAmGmUmUmC*mC*mA[ | | mGmCmAmCfUmUfGmUmAmCm | |
| | TEG-Tocopherol] | | AmG*mG*mA | |
| 35 | mC*mU*mGmUmAmCmAmAfGfUfG | 172 | VPmU*fG*mGmAmAmCmUmGm | 196 |
| | mCmUmCmAmGmUmUmC*mC*mA[ | | AmGmCmAmCfUmUfGmUmAmC | |
| | TEG-Cholesterol] | | mAmG*mG*mA | |
| 36 | mC*mU*mGmUmAmCmAmAfGfUfG | 173 | VPmU*fG*mGdAfAmCdTfGmAm | 197 |
| | mCmUmCdAmGdTmUmC*mC*mA[T | | GmCmAmCfUmUfGmUmAmCmA | |
| | EG-Tocopherol] | | mG*mG*mA | |
| 37 | mC*mU*mGmUmAmCmAmAfGfUfG | 174 | VPmU*fG*mGmAfAmC*mUfGmA | 198 |
| | mCmUmCmAmGmUmUmC*mC*mA[ | | mGmCmAmCfUmUfGmUmAmCm | |
| | TEG-Tocopherol] | | AmG*mG*mA | |
| 38 | mC*mU*mGmUmAmCmAmAfGfUfG | 175 | VPmU*fG*mGmAfA*mCmUfGmA | 199 |
| | mCmUmCmAmGmUmUmC*mC*mA[ | | mGmCmAmCfUmUfGmUmAmCm | |
| | TEG-Tocopherol] | | AmG*mG*mA | |

Abbreviations-“m” indicates 2′-OMe; “f” indicates 2′-fluoro; “*” indicates a modified linkage (e.g., a phosphorothioate linkage); “VP” indicates 5′-vinylphosphonate; “(Ab)” indicates abasic moiety. “r” indicates a position comprising a ribose sugar; and “d” indicates a position comprising a deoxyribose sugar.

[0120] In some embodiments, a conjugate described herein comprises a sequence set forth in Table 2 or Table 4 or Table 5. In some embodiments, a conjugate described herein comprises a double-stranded RNA set forth in Table 2 or Table 4 or Table 5 (e.g., a conjugate comprising a sense strand and an antisense strand of a double-stranded RNA set forth in Table 2 or Table 4 or Table 5, wherein the sense-strand is conjugated to tocopherol or cholesterol). In some embodiments, a conjugate described herein comprises a sequence set forth in Table 2 or Table 4 or Table 5 (e.g., a sense strand) which is bonded (e.g., covalently bonded) to a linker described herein (e.g., a TEG linker, such as one which connects a sense strand of a double-stranded RNA to tocopherol or cholesterol).

[0121] For the sense strands, the types of solid supports were universal CPG: Universal UnyLinker (Chemgenes, Catalog No. AT273-27), 3′ Teg-Tocopherol (LGC Biosearch Technologies, Catalog No. BG7-1190), and 3′ Teg-Cholesterol (Chemgenes, Catalog No. N-9166-05) were purchased commercially. For all the antisense strands, commercially available standard support was utilized and dependent on sequence. Standard reagents were used in the oligo synthesis (Table 6), where 0.1M xanthane hydride in pyridine was used as the sulfurization reagent and 20% DEA in ACN was used as an auxiliary wash post synthesis. All monomers (Table 7) were made at 0.1M in ACN and contained a molecular sieves trap bag.

[0122] The oligonucleotides were cleaved and deprotected (C/D) at 45° C. for 20 hours. The sense strands were C/D from the CPG using ammonia hydroxide (28-30%, cold), whereas 3% DEA in ammonia hydroxide (28-30%, cold) was used for the antisense strands. C/D was determined complete by IP-RP LCMS when the resulting mass data confirmed the identity of sequence. Dependent on scale, the CPG was filtered via 0.45 um PVDF syringeless filter, 0.22 um PVDF Steriflip® vacuum filtration or 0.22 um PVDF Stericup® Quick release. The CPG was back washed/rinsed with either 30% ACN/RNAse free water or 30% EtOH/RNAse free water then filtered through the same filtering device and combined with the first filtrate. This was repeated twice. The material was then divided evenly into 50 mL falcon tubes to remove organics via Genevac™. After concentration, the crude oligonucleotides were diluted back to synthesized scale with RNAse free water and filtered either by 0.45 μm PVDF syringeless filter, 0.22 μm PVDF Steriflip® vacuum filtration or 0.22 μm PVDF Stericup® Quick release.

[0123] The crude oligonucleotides were purified via AKTA™ Pure purification system using either anion-exchange (AEX) or reverse phase (RP) a source 15Q-RP column. For AEX, an ES Industry Source™ 15Q column maintaining column temperature at 65° C. with MPA: 20 mM NaH₂PO₄, 15% ACN, pH 7.4 and MPB: 20 mM NaH₂PO₄, 1M NaBr, 15% ACN, pH 7.4. For RP, a Source™ 15Q-RP column with MPA: 50 mM NaOAc with 10% ACN and MPB: 50 mM NaOAc with 80% ACN. In all cases, fractions which contained a mass purity greater than 85% without impurities >5% where combined.

[0124] The purified oligonucleotides were desalted using 15 mL 3K MWCO centrifugal spin tubes at 3500×g for ~30 min. The oligonucleotides were rinsed with RNAse free water until the eluent conductivity reached <100 usemi/cm. After desalting was complete, 2-3 mL of RNAse free water was added then aspirated 10 times, the retainment was transferred to a 50 mL falcon tube, this was repeated until complete transfer of oligo by measuring concentration of compound on filter via nanodrop. The final oligonucleotide was then nano filtered 2× via 15 mL 100K MWCO centrifugal spin tubes at 3500×g for 2 min. The final desalted oligonucleotides were analyzed for concentration (nano drop at A260), characterized by IP-RP LCMS for mass purity and UPLC for UV-purity.

[0125] For the preparation of duplexes, equimolar amounts of sense and antisense strand were combined and heated at 65° C. for 10 minutes then slowly cooled to ambient temperature over 40 minutes. Integrity of the duplex was confirmed by UPLC analysis and characterized by LCMS using IP-RP. All duplexes were nano filtered then endotoxin levels measured via Charles River Endosafe® Cartridge Device to give the final compounds of conjugated RNAi. For in vivo analysis, the appropriate amount of duplex was lyophilized then reconstituted in 1×PBS for rodent studies and a CSF for non-human primate studies.

TABLE 6
Oligonucleotide Synthesis Reagents
Reagents

Activator Solution (0.5M ETT in ACN)
Cap A (Acetic Anhydride, Pyridine in THF, 1:1:8)
Cap B (1-Methylimidazole in THF, 16:84)
Oxidation Solution (0.02M Iodine in THF/Pyridine/Water,
70:20:10)
Deblock Solution, 3% TCA in DCM (w/v)
Acetonitrile (Anhydrosolv, Water max. 10 ppm)
Xanthane Hydride (0.1M in Pyridine)
Diethylamine (20% in Acetonitrile)

TABLE 7
Phosphoramidites

| Phosphoramidite | Abbreviation | Supplier | Catalog # | CAS |
|---|---|---|---|---|
| DMT-2′-F-A(Bz)-CE | fA | Hongene | PD1-001 | 136834-22-5 |
| Phosphoamidite | | | | |
| DMT-2′-F-C(Ac)-CE | fC | Hongene | PD3-001 | 159414-99-0 |
| Phosphoamidite | | | | |
| DMT-2′-F-G(iBu)-CE | fG | Hongene | PD2-002 | 144089-97-4 |
| Phosphoamidite | | | | |
| DMT-2′-F-U-CE | fU | Hongene | PD5-001 | 146954-75-8 |
| Phosphoamidite | | | | |
| DMT-2′-O-Me-A(Bz)- | mA | Hongene | PR1-001 | 110782-31-5 |
| CE Phosphoamidite | | | | |
| DMT-2′-O-Me-C(Ac)- | mC | Hongene | PR3-001 | 199593-09-4 |
| CE Phosphoamidite | | | | |
| DMT-2′-O-Me-G(iBu)- | mG | Hongene | PR2-002 | 150780-67-9 |
| CE Phosphoamidite | | | | |
| DMT-2′-O-Me-U-CE | mU | Hongene | PR5-001 | 110764-79-9 |
| Phosphoamidite | | | | |
| 5′bis(POM) vinyl | POM-VPmU | Hongene | PR5-032 | BVPMUP23B2A1 |
| phosphate-2′-Ome- | | | | |
| U3′CE | | | | |
| phosphoroamidite | | | | |
| Reverse Abasic | iAb | Chemgenes | ANP-1422 | 401813-16-9 |
| phosphoroamidite | | | | |
| Abasic | Ab | Chemgenes | ANP-7058 | 129821-76-7 |
| phosphoroamidite | | | | |
| 5′-O-Dimethoxytrityl- | rA | LGC | LK-2306 | 104992-55-4 |
| N6-benzoyl-2′-O- | | | | |
| TBDMSi-adenosine-3′- | | | | |
| O-(beta-cyanoethyl- | | | | |
| N,N-diisopropyl) | | | | |
| phosphoramidite | | | | |
| 5′-O-Dimethoxytrityl- | rU | LGC | LK-2040 | 118362-03-1 |
| 2′-O-TBDMSi-uridine- | | | | |
| 3′-O-(beta- | | | | |
| cyanoethyl-N,N- | | | | |
| diisopropyl) | | | | |
| phosphoramidite | | | | |
| 5′-O-Dimethoxytrityl- | rG | Thermo | XI2142 | 147201-04-5 |
| N2-isobutyryl-2′-O- | | Fisher | | |
| TBDMSi-guanosine-3′- | | Scientific | | |
| O-(Beta-cyanoethyl- | | | | |
| N,N-diisopropyl) | | | | |
| phosphoramidite | | | | |

### Example 2. In Vitro Characterization of the RNAi Agents

[0126] Selected RNAi agents were tested for mRNA Target 1 (APOE) or mRNA Target 2 (SNCA) inhibition in cultured cells, including HEP3B, SH-SY5Y, iPSC astrocyte cells or mouse primary cortical neurons.

### Materials and Methods

[0127] HEP3B, SH-SY5Y and Astrocyte Cell Culture and RNAi Treatment and Analysis: SH-SY5Y cells (ATCC CRL-2266) were derived from the SK-N-SH neuroblastoma cell line (Ross, R. A., et al., 1983. J Natl Cancer Inst 71, 741-747). The base medium was composed of a 1:1 mixture of ATCC-formulated Eagle's Minimum Essential Medium, (Cat No. 30-2003), and F12 Medium. The complete growth medium was supplemented with 10% fetal bovine serum, 1× amino acids, 1× sodium bicarbonate, and 1× penicillin-streptomycin (Gibco) and cells incubated at 37° C. in a humidified atmosphere of 5% CO₂. On Day One, SH-SY5Y cells were plated in 96 well fibronectin coated tissue culture plates and allowed to attach overnight. On Day Two, complete media was removed and replaced with RNAi agent in serum free media. Cells were incubated with RNAi agent for 72 hours before analysis of gene expression. Analysis of changes in gene expression in RNAi treated SH-SY5Y cells was measured using Cells-to-C_{T} Kits following the manufacturer's protocol (ThermoFisher A35377). Predesigned gene expression assays (supplied as 20× mixtures) were selected from Applied Bio-systems (Foster City, CA, USA). The efficiencies of these assays (mRNA Target 1 or 2 and ThermoFisher Hs99999905_ml GAPDH) were characterized with a dilution series of cDNA. RT-QPCR was performed in MicroAmp Optical 384-well reaction plates using QuantStudio 7 Flex system. The delta-delta CT method of normalizing to the housekeeping gene GAPDH was used to determine relative amounts of gene expression. GraphPad Prism v9.0 was used to determine IC50 with a four parameter logistic fit.

[0128] HEP3B cells (ATCC HB-8064) were cultured in medium containing ATCC-formulated Eagle's Minimum Essential Medium, Catalog No. 30-2003 containing fetal bovine serum at a final concentration of 10%. On Day One, HEP3B cells were plated in 96 well tissue culture plates and allowed to attach overnight. On Day Two, complete media was removed and replaced with RNAi agent in serum free media. Cells were incubated with RNAi agent for 72 hours before analysis of protein expression. Analysis of changes in protein expression in RNAi treated HEP3B cells was measured using a Perkin Elmer AlphaLISA assay for evaluating protein levels corresponding to expression of mRNA Target 1 (AL395) according to manufacturer's protocol. GraphPad Prism v9.0 was used to determine IC50 with a four parameter logistic fit.

[0129] Astrocytes derived from iPSCs (Cellular Dynamics 01434) were grown according to manufacturer's protocol. One Day One, astrocytes were plated in 96 well tissue culture plates and allowed to attach overnight. On Day Two, complete media was removed and replaced with RNAi agent in serum free media. Cells were incubated with RNAi agent for 72 hours before analysis of gene expression using methods described above (Thermofisher assay ID Hs00171168_ml).

[0130] Mouse Primary Cortical Neuron (MCN) Culture and RNAi Treatment and Analysis: Mouse primary cortical neurons were isolated from wild type C57BL6 mouse embryos at E18. Cells were plated in poly-D-lysine coated 96-well plates at a density of 40 k cells/well and cultured in NbActiv1 (BrainBits, LLC) containing 1% Antibiotic/Antimycotic (Corning) for 7 days at 37° C. in a tissue culture incubator in a humidified chamber with 5% CO₂. On Day 7, half of the medium was removed from each well and 2× concentration of RNAi in culture media with 2% FBS was added for treatment as CRC and incubated with cells for additional 7, 14 or 21 days. Half media change was done every 7 days with fresh culture media. At the end of RNAi treatment, RT-qPCR was performed to quantify SNCA levels using TaqMan Fast Advanced Cell-to-CT kit. Specifically, cells were lysed, cDNA was generated on Mastercycler X50a (Eppendorf), and qPCR was carried out on QuantStudio 7 Flex Real-Time PCR System (Applied Biosystems). The APOE gene expression levels were normalized by (3-actin (ThermoFisher, Mm02619580_g1) using respective probes.

[0131] 293T Luciferase Transfection, RNAi Treatment and Analysis: 293T cells transfected with the pMIR-luciferase construct (Invitrogen, Waltham, MA) containing the target SNCA sequence were plated overnight at 37° C.; 5% CO₂. Cells were transfected on day two with siRNAs using RNAiMAX (Invitrogen, Waltham, MA) using the protocol provided by the manufacturer. Cells were incubated at 37° C.; 5% CO2 for 48 hrs. Plates were cooled to room temperature followed by the addition of an equal volume of Bio-Glo (Promega, Madison, WI) to each well. Plates were incubated in the dark at room temperature and read on a BioTek Neos2 plate reader (Agilent, Santa Clara, CA).

[0132] Representative results from these analyses are shown in Table 11.

### Results

[0133] Tables 8, 9, 10, and 11 show the in vitro activities of the RNAi agents against mRNA Target 1 (APOE) and mRNA Target 2 (SNCA) in SH-SY5Y, HEP3B, astrocyte cells, and mouse primary cortical neurons (MCN).

TABLE 8
In vitro activity of mRNA Target 1 (APOE) double
stranded RNAs in HEP3B and Astrocytes.

| | HEP3B | HEP3B | iAstrocyte | iAstrocyte | Pattern | |
|---|---|---|---|---|---|---|
| dsRNA | protein | protein | mRNA | mRNA | 5′-3′ | 5′-3′ |
| No. | % KD | IC50 nM | % KD | IC50 nM | AntiSense2′F | Sense2′F |
| 1 | 77 | 405 | 91 | 101 | 2, 6, 14, 16 | 7, 9, 10, 11 |
| 1 | 84 | 180 | 97 | 45 | 2, 5, 14, 16 | 7, 9, 10, 11 |
| 1 | 73 | 3266 | 96 | 89 | 2, 4, 14, 16 | 7, 9, 10, 11 |
| 1 | 69 | 1168 | 96 | 39 | 2, 7, 14, 16 | 7, 9, 10, 11 |
| 1 | 66 | na | 95 | 59 | 2, 3, 7, 14, 16 | 7, 9, 10, 11 |
| 1 | 87 | 215 | 98 | 44 | 2, 5, 7, 14, 16 | 7, 9, 10, 11 |
| 1 | 92 | 32 | | | 2, 5, 7, 14, 16 | 9, 10, 11 |
| 2 | 93 | 76 | 99 | 28 | 2, 6, 14, 16 | 7, 9, 10, 11 |
| 2 | 92 | 27 | 99 | 19 | 2, 5, 14, 16 | 7, 9, 10, 11 |
| 2 | 93 | 37 | 99 | 15 | 2, 4, 14, 16 | 7, 9, 10, 11 |
| 2 | 94 | 20 | 99 | 13 | 2, 7, 14, 16 | 7, 9, 10, 11 |
| 2 | 92 | 14 | 99 | 13 | 2, 3, 7, 14, 16 | 7, 9, 10, 11 |
| 2 | 91 | 25 | 99 | 13 | 2, 5, 7, 14, 16 | 7, 9, 10, 11 |
| 2 | 94 | 11 | | | 2, 5, 7, 14, 16 | 9, 10, 11 |
| 3 | 80 | 104 | 94 | 64 | 2, 6, 14, 16 | 7, 9, 10, 11 |
| 3 | 83 | 184 | 88 | 71 | 2, 5, 14, 16 | 7, 9, 10, 11 |
| 3 | 76 | 285 | 82 | 219 | 2, 4, 14, 16 | 7, 9, 10, 11 |
| 3 | 84 | 155 | 94 | 6.6 | 2, 7, 14, 16 | 7, 9, 10, 11 |
| 3 | 83 | 54 | 98 | 37 | 2, 3, 7, 14, 16 | 7, 9, 10, 11 |
| 3 | 86 | 115 | 92 | 37 | 2, 5, 7, 14, 16 | 7, 9, 10, 11 |
| 3 | 95 | 21 | | | 2, 5, 7, 14, 16 | 9, 10, 11 |
| 4 | 74 | 135 | 76 | 57 | 2, 6, 14, 16 | 7, 9, 10, 11 |
| 4 | 76 | 203 | 74 | 191 | 2, 5, 14, 16 | 7, 9, 10, 11 |
| 4 | 66 | 287 | 74 | 244 | 2, 4, 14, 16 | 7, 9, 10, 11 |
| 4 | 85 | 75 | 92 | 95 | 2, 7, 14, 16 | 7, 9, 10, 11 |
| 4 | 77 | 159 | 85 | 111 | 2, 3, 7, 14, 16 | 7, 9, 10, 11 |
| 4 | 87 | 71 | 94 | 56 | 2, 5, 7, 14, 16 | 7, 9, 10, 11 |
| 4 | 84 | 10 | | | 2, 5, 7, 14, 16 | 9, 10, 11 |

TABLE 9
In vitro activity of mRNA Target 2 (SNCA)
double stranded RNAs in Sy5y Neurons.

| | |
|---|---|
| Experiment 1 | Experiment 2 |

| dsRNA | Rel IC50 | % pct | Rel IC50 | % pct |
|---|---|---|---|---|
| No. | (nM) | Rel Max | (nM) | Rel Max |
| 6 | 30 | 78.8 | — | — |
| 7 | 117 | 77.4 | 52.5 | 80.1 |
| 7 | 74.9 | 63.4 | 21.7 | 77.3 |
| 7 | 95.3 | 62.8 | 94.7 | 74.7 |
| 7 | 201 | 73.1 | 24 | 74.3 |
| 7 | 43 | 74.2 | 33.1 | 78.4 |
| 7 | 83.8 | 71.4 | 72.8 | 75.2 |
| 7 | 211 | 68 | 43.6 | 81.1 |
| 7 | 243 | 62.6 | 41.3 | 72.7 |
| 7 | 251 | 68.9 | 54.1 | 76 |
| 7 | 51 | 80.1 | — | — |
| 8 | 111 | 69.5 | 62.4 | 71.8 |
| 9 | 46.6 | 73.9 | 25.7 | 79.9 |
| 7 | 329 | 68 | 111 | 82.4 |
| 7 | 203 | 79.2 | 45.7 | 78.1 |
| 7 | 21.5 | 75.5 | — | — |
| 7 | 18.9 | 84.1 | — | — |
| 7 | 135 | 64.8 | 34.2 | 77 |
| 10 | 243.77 | 65.04 | — | — |
| 11 | 332.73 | 67.48 | — | — |
| 12 | 130.99 | 74.95 | — | — |
| 12 | 54.17 | 76.53 | — | — |
| 12 | 144.71 | 77.32 | — | — |
| 12 | 298.64 | 65.78 | — | — |
| 12 | 163.81 | 77.67 | — | — |
| 7 | 165.61 | 73.56 | — | — |
| 12 | 56.26 | 70.94 | — | — |
| 7 | 43.79 | 61.48 | — | — |
| 13 | 37.01 | 65.34 | — | — |
| 14 | 135.64 | 69.17 | — | — |
| 7 | 39.80 | 70.43 | — | — |
| 6 | 229.01 | 68.06 | — | — |
| 6 | 125.75 | 77.99 | — | — |
| 15 | 49.8 | 77.4 | — | — |
| 16 | N/A | N/A | — | — |
| 17 | 84.2 | 74.2 | — | — |
| 18 | 6.39 | 73.3 | — | — |
| 19 | N/A | N/A | — | — |
| 20 | 223 | 64.2 | — | — |
| 21 | N/A | N/A | — | — |
| 22 | N/A | N/A | — | — |
| 23 | N/A | N/A | — | — |
| 24 | N/A | N/A | — | — |
| 25 | 6 | 82.3 | — | — |
| 26 | 34.5 | 77.6 | — | — |
| 27 | 6.09 | 75.9 | — | — |
| 28 | 4.46 | 81.4 | — | — |
| 29 | >1000 | 12 | — | — |
| 30 | 1.26 | 72.40 | — | — |
| 31 | 2.08 | 75.40 | — | — |
| 32 | 0.86 | 78.50 | — | — |
| 33 | 1000.00 | 8.58 | — | — |
| 34 | 55.15 | 72.28 | — | — |
| 35 | 2.06 | 66.30 | — | — |
| 36 | 1.55 | 70.40 | — | — |
| 37 | 1.86 | 79.70 | — | — |
| 38 | 3.73 | 78.70 | — | — |

TABLE 10
In vitro activity of mRNA Target 2 (SNCA) double
stranded RNAs in mouse cortical neurons (MCNs).

| dsRNA | MCN | MCN % KD | MCN % KD |
|---|---|---|---|
| No. | IC50 | at 1 uM | at 4 nM |
| 6 | 2.3 | 99 | 60.7 |
| 7 | 3 | 99.7 | 63.4 |
| 7 | 5.5 | 99.4 | 54.9 |
| 7 | 4.5 | 99.2 | 48.8 |
| 7 | 5 | 99.4 | 66 |
| 7 | 1.86 | 99.7 | 73 |
| 7 | 4.5 | 99.4 | 57.7 |
| 7 | 2.6 | 99.6 | 67.7 |
| 7 | 2.2 | 99.3 | 56.4 |
| 7 | 3 | 98.6 | 50.3 |
| 7 | 1.8 | 99.6 | 72 |
| 8 | 2.1 | 99.3 | 67.5 |
| 9 | 4.8 | 99.6 | 60.7 |
| 7 | 3.5 | 99.6 | 64.5 |
| 7 | 8 | 98.7 | 35 |
| 7 | 1.7 | 99.6 | 70.1 |
| 7 | 2.3 | 99.6 | 65.1 |
| 7 | 3.1 | 99.6 | 63.4 |
| 10 | 4.533 | 97.3 | 38.4 |
| 11 | 6.18 | 96.7 | 28 |
| 12 | 3.116 | 98.3 | 48 |
| 12 | 3.332 | 99 | 48 |
| 12 | 6.607 | 96.8 | 34.5 |
| 12 | 3.11 | 98.8 | 49.8 |
| 12 | 4.079 | 98.4 | 44 |
| 7 | 3.737 | 99 | 50.1 |
| 12 | 3.819 | 98.3 | 44.5 |
| 7 | 3.19 | 98.5 | 47.6 |
| 13 | 3.666 | 98.2 | 40.4 |
| 14 | 5.949 | 97.3 | 31.8 |
| 7 | 3.251 | 98.7 | 47.6 |
| 6 | 10.99 | 97.4 | 10.7 |
| 6 | 3.664 | 99 | 50.3 |
| 15 | 8.4 | 32 | 31.1 |
| 16 | 5.47 | 96.8 | 48.78 |
| 17 | 5.844 | 98.3 | 45.7 |
| 18 | 0.92 | 99.53 | 82.13 |
| 19 | 5.09 | 94.7 | 43.8 |
| 20 | 3.02 | | 57.6 |
| 21 | 3.034 | 92.03 | 48.72 |
| 22 | 41.8 | 58.15 | 1.63 |
| 23 | 10.08 | 85.71 | 34 |
| 24 | 23.55 | 83.34 | 12.65 |
| 25 | 1.94 | 98.93 | 68.16 |
| 26 | 9.41 | 89.35 | 24.16 |
| 27 | 3.22 | 98.12 | 49.57 |
| 28 | 2.96 | 95 | 56.29 |
| 29 | 5.95 | — | 38.4 |

TABLE 11
Luciferase reporter analyses of in vitro activity
of mRNA Target 2 (SNCA) double stranded RNAs.

| | Luciferase | | | |
|---|---|---|---|---|
| ds RNA | Rel IC50 | % KD | % KD | % KD |
| No. | (10 nM) | (50 nM) | (10 nM) | (0.08 nM) |
| 15 | — | — | — | — |
| 16 | 0.0844 | 89.77145726 | — | 42.65963399 |
| 17 | — | — | — | — |
| 18 | — | — | — | — |
| 19 | 0.03691 | — | 82.11 | — |
| 20 | — | — | — | — |
| 21 | 0.0762 | — | 87.29001324 | 44.40367302 |
| 22 | 0.4573 | — | 63.1203076 | 2.780439406 |
| 23 | 0.2901 | — | 79.29184843 | −9.237009968 |
| 24 | 0.0649 | — | 83.19747228 | 46.52584318 |
| 25 | — | — | — | — |
| 26 | — | — | — | — |
| 27 | — | — | — | — |
| 28 | — | — | — | — |
| 29 | 0.09 | — | 50.01 | — |
| 30 | — | — | — | — |
| 31 | — | — | — | — |
| 32 | — | — | — | — |
| 33 | 0.02871 | — | 86.59 | — |
| 34 | — | — | — | — |
| 35 | — | — | — | — |
| 36 | — | — | — | — |
| 37 | — | — | — | — |
| 38 | — | — | — | — |

### Example 3. In Vivo Characterization of Selected RNAi Agents in Mice

[0134] The efficacy of the RNAi agents for mRNA Target 1 (APOE) was studied in mRNA Target 1 knock-in (KI) mice in the brain and liver. Six mice received intracerebroventricular (ICV) injection of 100 μg of the RNAi agent (e.g., dsRNAs described in Table 2) or PBS (phosphate buffered saline), and were sacrificed on either at D15, or D57 after the injection.

[0135] Human mRNA Target 1 (APOE) expression in spinal cord and brain were measured and analyzed by quantitative PCR (qPCR). Another cohort of mRNA Target 1 (APOE) KI mice received SC injection of the RNAi agent or PBS and were serially bled for up to 12 weeks post injection and serum analyzed for mRNA Target 1(APOE) protein levels as described above.

[0136] Representative results are shown in Table 12. Data in Table 12 shows dsRNA constructs comprising 2′F-modifications at positions 2, 5, 7, 14, and 16 of the antisense strand were more durable in vivo than dsRNA constructs containing 2′F-modifications at other positions. Additionally, injection of dsRNA constructs comprising 2′F-modifications at positions 2, 5, 7, 14, and 16 of the antisense strand, at two different concentrations, resulted in reduction of mRNA Target 1(APOE) protein serum concentration in vivo for at least 8 weeks and reduction of mRNA Target 1 (APOE) expression in several types of brain tissue, including brain stem (BS), hippocampus (H), hippocampal cortex (HCTX), and frontal cortex (FCTX).

[0137] The efficacy of the RNAi agents for mRNA Target 2 (SNCA) was studied in wildtype C56BL/6N mice. Six mice received intracerebroventricular (ICV) injection of 30 μg of the RNAi agent (e.g., dsRNA described in Table 4) or PBS (phosphate buffered saline), and were sacrificed on either at D15, or D57 after the injection. Mouse mRNA Target 2 (SNCA) mRNA expression in spinal cord and brain were measured and analyzed by quantitative PCR (qPCR). Data are shown in Table 13 and indicate high levels of mRNA Target 2 (SNCA) knockdown at 2 months following ICV injection. The highest levels of mRNA Target 2 (SNCA) knockdown were observed in the brain stem, frontal cortex, striatum (STR), and lumbar spinal cord tissues (e.g., LDRG cells) of mouse subjects (see Table 13).

TABLE 12
In vivo activity of mRNA Target 1 (APOE).

| | | | | Days | | Pattern | |
|---|---|---|---|---|---|---|---|
| dsRNA | | | | post | Percent | 5′-3′ | 5′-3′ |
| No. | Tissue/Brain Region | dose/route | | dose | Remaining | AntiSense2′F | Sense2′F |
| 2 | Lumber Spinal Cord | 100 | ug/ICV | 15 | 5 | 2, 5, 7, 14, 16 | 7, 9, 10, 11 |
| 2 | Hippocampus | 100 | ug/ICV | 15 | 24 | 2, 5, 7, 14, 16 | 7, 9, 10, 11 |
| 2 | Frontal Cortex | 100 | ug/ICV | 15 | 36 | 2, 5, 7, 14, 16 | 7, 9, 10, 11 |
| 2 | Brain Stem | 100 | ug/ICV | 15 | 3 | 2, 5, 7, 14, 16 | 7, 9, 10, 11 |
| 2 | Liver | 100 | ug/ICV | 15 | 41 | 2, 5, 7, 14, 16 | 7, 9, 10, 11 |
| 2 | Liver | 10 | mg/kg/IV | 7 | 29 | 2, 5, 7, 14, 16 | 9, 10, 11 |
| 2 | Lumber Spinal Cord | 100 | ug/ICV | 15 | 4 | 2, 5, 7, 14, 16 | 7, 9, 10, 11 |
| 2 | Hippocampus | 100 | ug/ICV | 15 | 35 | 2, 5, 7, 14, 16 | 7, 9, 10, 11 |
| 2 | Frontal Cortex | 100 | ug/ICV | 15 | 57 | 2, 5, 7, 14, 16 | 7, 9, 10, 11 |
| 2 | Brain Stem | 100 | ug/ICV | 15 | 3 | 2, 5, 7, 14, 16 | 7, 9, 10, 11 |
| 2 | Liver | 100 | ug/ICV | 15 | 67 | 2, 5, 7, 14, 16 | 7, 9, 10, 11 |
| 2 | Liver | 10 | mg/kg/IV | 7 | 28 | 2, 5, 7, 14, 16 | 9, 10, 11 |
| 2 | Lumber Spinal Cord | 100 | ug/ICV | 57 | 14 | 2, 5, 7, 14, 16 | 7, 9, 10, 11 |
| 2 | Hippocampus | 100 | ug/ICV | 57 | 51 | 2, 5, 7, 14, 16 | 7, 9, 10, 11 |
| 2 | Frontal Cortex | 100 | ug/ICV | 57 | 77 | 2, 5, 7, 14, 16 | 7, 9, 10, 11 |
| 2 | Brain Stem | 100 | ug/ICV | 57 | 25 | 2, 5, 7, 14, 16 | 7, 9, 10, 11 |
| 2 | Liver | 100 | ug/ICV | 57 | 92 | 2, 5, 7, 14, 16 | 7, 9, 10, 11 |
| 2 | Liver | 10 | mg/kg/IV | 57 | 44 | 2, 5, 7, 14, 16 | 9, 10, 11 |
| 2 | Lumber Spinal Cord | 100 | ug/ICV | 57 | 22 | 2, 5, 7, 14, 16 | 7, 9, 10, 11 |
| 2 | Hippocampus | 100 | ug/ICV | 57 | 61 | 2, 5, 7, 14, 16 | 7, 9, 10, 11 |
| 2 | Frontal Cortex | 100 | ug/ICV | 57 | 84 | 2, 5, 7, 14, 16 | 7, 9, 10, 11 |
| 2 | Brain Stem | 100 | ug/ICV | 57 | 50 | 2, 5, 7, 14, 16 | 7, 9, 10, 11 |
| 2 | Liver | 100 | ug/ICV | 57 | 99 | 2, 5, 7, 14, 16 | 7, 9, 10, 11 |
| 2 | Liver | 10 | mg/kg/IV | 57 | 47 | 2, 5, 7, 14, 16 | 9, 10, 11 |

TABLE 13
In vivo activity of mRNA Target
2 (SNCA) double stranded RNAs.

| | Percent Knockdown | | | | |
|---|---|---|---|---|---|
| | | | | | Lumbar |
| | | | | | Dorsal |
| | | | | Lumbar | Root |
| dsRNA | Brain | Frontal | Striatum | Spinal | Ganglion |
| No. | Stem | Cortex | (STR) | Cord | (LDRGs) |
| 6 | 79 | 63 | 70 | 42 | 16 |
| 7 | 83 | 52 | 60 | 70 | 16 |
| 7 | 72 | 51 | 53 | 28 | 10 |
| 7 | 79 | 48 | 61 | 45 | 17 |
| 7 | 72 | 47 | 43 | 43 | 22 |
| 7 | 73 | 46 | 57 | 42 | 16 |
| 7 | 78 | 43 | 59 | 30 | 16 |
| 7 | 69 | 43 | 56 | 51 | 14 |
| 7 | 75 | 42 | 46 | 43 | 17 |
| 7 | 70 | 40 | 40 | 52 | 24 |
| 7 | 77 | 39 | 60 | 29 | 18 |
| 8 | 63 | 38 | 42 | 11 | 11 |
| 9 | 52 | 34 | 49 | 41 | 12 |
| 7 | 59 | 33 | 49 | 40 | 18 |
| 7 | 59 | 33 | 34 | 24 | 22 |
| 7 | 78 | 31 | 30 | 7 | 14 |
| 7 | 75 | 28 | 64 | 38 | 27 |
| 7 | 67 | 25 | 39 | 36 | 3 |
| 10 | 81 | 60 | 59 | 64 | 26 |
| 11 | 74 | 55 | 67 | 60 | 17 |
| 12 | 52 | 31 | 22 | 36 | 16 |
| 12 | 79 | 65 | 64 | 61 | 28 |
| 12 | 75 | 59 | 43 | 62 | 41 |
| 12 | 74 | 52 | 62 | 46 | 29 |
| 12 | 74 | 52 | 63 | 58 | 40 |
| 7 | 73 | 57 | 65 | 34 | 10 |
| 12 | 55 | 47 | 44 | 45 | 25 |
| 7 | 82 | 50 | 63 | 50 | 23 |
| 13 | 71 | 52 | 68 | 41 | 40 |
| 14 | 60 | 40 | 47 | 53 | 42 |
| 7 | 74 | 44 | 66 | 56 | 27 |
| 6 | 62 | 45 | 50 | 45 | 32 |
| 6 | 79 | 58 | 72 | 71 | 33 |

### Example 4. siRNA Conjugates

[0138] This example describes production of double stranded nucleic acid-GalNAc conjugates. For the synthesis of GalNAc-conjugated sense strands, a sense strand with a 3′ C6-NH2 functional group is first synthesized using standard phosphoramidite chemistry. A stock solution of GalNAc ligand-NHS ester (10 mmol/L in acetonitrile; 1 eq) is prepared. Borate buffer (10% v/v; 20×) is added to oligonucleotide C6-NH2 sense strand in an Eppendorf tube, then GalNAc ligand (5 eq) is added. The mixture is shaken at ambient temperature for 16 hours. After this time, the mixture is transferred to a 15 mL falcon tube, ammonium hydroxide (28 mass %) is added, and the mixture is shaken at ambient temperature for 2 hours. The ammonia is then removed in vacuo. The residue is purified by ion-exchange chromatography. Conditions: Solvent A: 15% MeCN/20 mM NaH2PO4, Solvent B: 15% MeCN/20 mM NaH2PO4, 1M NaBr; 35-55% B over 5 CV at 8 mL/min, column temperature 60° C. The desired fractions are pooled and desalted by spin-filtration using an Eppendorf centrifuge or desalting column. After desalting, the material is recovered and OD and volume are measured to obtain concentration.

[0139] Alternatively, conjugation is to the 5′ position of the sense strand through immobilizing the GalNAc ligand on microporous polystyrene resin or controlled pore glass and synthesizing using established solid phase oligonucleotide synthesis methods with 5′-CE β-cyanoethyl) phosphoramidites.

[0140] Alternatively, the GalNAc ligand is converted to a suitable phosphoramidite and delivered to the 5′ position of the sense strand using standard phosphoramidite chemistry.

[0141] To generate the siRNA duplexes of a sense and antisense strand, the following procedures are performed. To a falcon tube containing oligonucleotide sense strand-GalNAc conjugate, the corresponding antisense oligonucleotide (1 eq) is added and vortexed for 10 seconds before spin-filtering through 100K MWCO Amicon filter unit to remove particulates.

[0142] The filtrate is recovered and concentrated in vacuo on a Genevac evaporator. The residue is reconstituted in 1×PBS, filtered through 0.2μ filter, and OD and volume are measured to obtain concentration.

[0143] An endotoxin test is performed using a Limulus amebocyte lysate on an Endosafe® NexGen PTS instrument.

### EQUIVALENTS

[0144] While several inventive embodiments have been described and illustrated herein, those of ordinary skill in the art will readily envision a variety of other means and/or structures for performing the function and/or obtaining the results and/or one or more of the advantages described herein, and each of such variations and/or modifications is deemed to be within the scope of the inventive embodiments described herein. More generally, those skilled in the art will readily appreciate that all parameters, dimensions, materials, and configurations described herein are meant to be exemplary and that the actual parameters, dimensions, materials, and/or configurations will depend upon the specific application or applications for which the inventive teachings is/are used. Those skilled in the art will recognize, or be able to ascertain using no more than routine experimentation, many equivalents to the specific inventive embodiments described herein. It is, therefore, to be understood that the foregoing embodiments are presented by way of example only and that, within the scope of the appended claims and equivalents thereto, inventive embodiments may be practiced otherwise than as specifically described and claimed. Inventive embodiments of the present disclosure are directed to each individual feature, system, article, material, kit, and/or method described herein. In addition, any combination of two or more such features, systems, articles, materials, kits, and/or methods, if such features, systems, articles, materials, kits, and/or methods are not mutually inconsistent, is included within the inventive scope of the present disclosure.

[0145] All definitions, as defined and used herein, should be understood to control over dictionary definitions, definitions in documents incorporated by reference, and/or ordinary meanings of the defined terms.

[0146] All references, patents and patent applications disclosed herein are incorporated by reference with respect to the subject matter for which each is cited, which in some cases may encompass the entirety of the document.

[0147] The indefinite articles “a” and “an,” as used herein in the specification and in the claims, unless clearly indicated to the contrary, should be understood to mean “at least one.”

[0148] The phrase “and/or,” as used herein in the specification and in the claims, should be understood to mean “either or both” of the elements so conjoined, i.e., elements that are conjunctively present in some cases and disjunctively present in other cases. Multiple elements listed with “and/or” should be construed in the same fashion, i.e., “one or more” of the elements so conjoined. Other elements may optionally be present other than the elements specifically identified by the “and/or” clause, whether related or unrelated to those elements specifically identified. Thus, as a non-limiting example, a reference to “A and/or B,” when used in conjunction with open-ended language such as “comprising” can refer, in one embodiment, to A only (optionally including elements other than B); in another embodiment, to B only (optionally including elements other than A); in yet another embodiment, to both A and B (optionally including other elements); etc.

[0149] As used herein in the specification and in the claims, “or” should be understood to have the same meaning as “and/or” as defined above. For example, when separating items in a list, “or” or “and/or” shall be interpreted as being inclusive, i.e., the inclusion of at least one, but also including more than one, of a number or list of elements, and, optionally, additional unlisted items. Only terms clearly indicated to the contrary, such as “only one of” or “exactly one of,” or, when used in the claims, “consisting of,” will refer to the inclusion of exactly one element of a number or list of elements. In general, the term “or” as used herein shall only be interpreted as indicating exclusive alternatives (i.e., “one or the other but not both”) when preceded by terms of exclusivity, such as “either,” “one of,” “only one of,” or “exactly one of.” “Consisting essentially of,” when used in the claims, shall have its ordinary meaning as used in the field of patent law.

[0150] As used herein in the specification and in the claims, the phrase “at least one,” in reference to a list of one or more elements, should be understood to mean at least one element selected from any one or more of the elements in the list of elements, but not necessarily including at least one of each and every element specifically listed within the list of elements and not excluding any combinations of elements in the list of elements. This definition also allows that elements may optionally be present other than the elements specifically identified within the list of elements to which the phrase “at least one” refers, whether related or unrelated to those elements specifically identified. Thus, as a non-limiting example, “at least one of A and B” (or, equivalently, “at least one of A or B,” or, equivalently “at least one of A and/or B”) can refer, in one embodiment, to at least one, optionally including more than one, A, with no B present (and optionally including elements other than B); in another embodiment, to at least one, optionally including more than one, B, with no A present (and optionally including elements other than A); in yet another embodiment, to at least one, optionally including more than one, A, and at least one, optionally including more than one, B (and optionally including other elements); etc.

[0151] It should also be understood that, unless clearly indicated to the contrary, in any methods claimed herein that include more than one step or act, the order of the steps or acts of the method is not necessarily limited to the order in which the steps or acts of the method are recited.

What is claimed is:

1. A double stranded nucleic acid comprising:
(i) a sense strand; and
(ii) an antisense strand having a 5′-end and a 3′-end, and consisting of modified nucleotides, wherein the modified nucleotides do not comprise more than five 2′-fluoro (2′F)-modified nucleotides, and wherein the 2′F-modified nucleotides are located at positions 2, 5, 7, 14, and 16 relative to the 5′-end of the antisense strand.

2. A double stranded nucleic acid comprising:
(i) a sense strand; and
(ii) an antisense strand having a 5′-end and a 3′-end, and consisting of modified nucleotides, wherein the modified nucleotides do not comprise more than five 2′F-modified nucleotides, and wherein the 2′F-modified nucleotides are located at positions 2, 3, 7, 14, and 16 relative to the 5′-end of the antisense strand.

3. A double stranded nucleic acid comprising:
(i) a sense strand; and
(ii) an antisense strand having a 5′-end and a 3′-end, and consisting of modified nucleotides, wherein the modified nucleotides do not comprise more than five 2′F-modified nucleotides, and wherein the 2′F-modified nucleotides are located at positions 2, 5, 8, 14, and 16 relative to the 5′-end of the antisense strand.

4. A double stranded nucleic acid comprising:
(i) a sense strand; and
(ii) an antisense strand having a 5′-end and a 3′-end, and consisting of modified nucleotides, wherein the modified nucleotides do not comprise more than six 2′F-modified nucleotides, and wherein the 2′F-modified nucleotides are located at positions 2, 4, 6, 8, 14, and 16 relative to the 5′-end of the antisense strand.

5. A double stranded nucleic acid comprising:
(i) a sense strand; and
(ii) an antisense strand having a 5′-end and a 3′-end, and consisting of modified nucleotides, wherein the modified nucleotides do not comprise more than five 2′F-modified nucleotides, and wherein the 2′F-modified nucleotides are located at positions 2, 6, 8, 14, and 16 relative to the 5′-end of the antisense strand.

6. The double stranded nucleic acid of any one of claims 1 to 5, wherein the sense strand comprises a 5′-end and a 3′-end, and comprises 2′F-modified nucleotides at:
(i) positions 9, 10, and 11 relative to the 5′-end of the sense strand;
(ii) positions 7, 9, and 11 relative to the 5′-end of the sense strand;
(iii) positions 7, 9, and 10 relative to the 5′-end of the sense strand; or
(iv) positions 7, 10, and 11 relative to the 5′-end of the sense strand.

7. The double stranded nucleic acid of claim 6, wherein the sense strand does not comprise any other 2′F-modified nucleotides.

8. A double stranded nucleic acid comprising a sense strand and an antisense strand, wherein the sense strand and the antisense strand form a duplex, wherein the antisense strand comprises a sequence complementary to a portion of a target mRNA, and wherein the antisense strand comprises five 2′F-modified nucleotides at one of the following set of positions from the 5′ end of the antisense strand: (a) positions 2, 5, 7, 14, and 16; (b) positions 2, 3, 7, 14, and 16; (c) positions 2, 5, 8, 14, and 16, and no other 2′F-modified nucleotides.

9. The double stranded nucleic acid of claim 8, wherein the sense strand comprises three 2′F-modified nucleotides at one of the following set of positions from the 5′ end of the sense strand: (a) positions 9, 10, and 11; (b) positions 7, 9, and 11; (c) positions 7, 9, 10; or (d) positions 7, 10, and 11.

10. The double stranded nucleic acid of claim 8 or 9, wherein the antisense strand comprises 2′-O-methyl modified nucleotides at positions other than the 2′F-modified positions.

11. The double stranded nucleic acid of any one of claims 8 to 10, wherein the sense strand comprises 2′-O-methyl modified nucleotides, 2′-O—C₁₂₋₁₆ alkyl modified nucleotides, or optionally one or more abasic moieties at positions other than the 2′F-modified positions.

12. The double stranded nucleic acid of any one of claims 1 to 11, wherein position 1 relative to the 5′-end of the sense strand or 5′-end of the antisense strand comprises a 5′ phosphate analog.

13. The double stranded nucleic acid of claim 12, wherein the 5′ phosphate analog comprises a 5′ vinyl phosphonate group.

14. The double stranded nucleic acid of claim 12 or 13, wherein the antisense strand comprises the 5′ phosphate analog.

15. The double stranded nucleic acid of any one of claims 1 to 14, wherein the sense strand is between 18 and 24 nucleotides in length.

16. The double stranded nucleic acid of any one of claims 1 to 15, wherein the sense strand is 21 nucleotides in length.

17. The double stranded nucleic acid of any one of claims 1 to 16, wherein the antisense strand is between 18 and 24 nucleotides in length.

18. The double stranded nucleic acid of any one of claims 1 to 17, wherein the antisense strand is 23 nucleotides in length.

19. The double stranded nucleic acid of any one of claims 1 to 18, wherein the sense strand and the antisense strand do not have the same length.

20. The double stranded nucleic acid of any one of claims 1 to 19, wherein the antisense strand is longer than the sense strand, optionally wherein the antisense strand is between 2 and 10 nucleotides longer than the sense strand.

21. The double stranded nucleic acid of any one of claims 1 to 20, wherein the modified nucleotides are modified ribonucleotides.

22. The double stranded nucleic acid of any one of claims 1 to 21, wherein the modified nucleotides of the sense strand comprise one or more 2′-O-methyl (2′OMe)-modified nucleotides or one or more 2′-O— C₁₂₋₁₆ alkyl modified nucleotides.

23. The double stranded nucleic acid of any one of claims 1 to 22 comprising one or more abasic moieties.

24. The double stranded nucleic acid of any one of claims 1 to 23, wherein the modified nucleotides of the sense strand comprise only 2′OMe-modified nucleotides with the exception of the 2′-fluoro (2′F)-modified nucleotides at the listed positions.

25. The double stranded nucleic acid of any one of claims 1 to 23, wherein the modified nucleotides of the sense strand comprise one or more 2′-O-methyl (2′OMe)-modified nucleotides, one or more 2′-O— C₁₂₋₁₆ alkyl modified nucleotides, or one or more abasic moieties.

26. The double stranded nucleic acid of any one of claims 1 to 25, wherein the modified nucleotides of the antisense strand comprise only 2′OMe-modified nucleotides with the exception of the 2′-fluoro (2′F)-modified nucleotides at the listed positions.

27. The double stranded nucleic acid of any one of claims 1 to 26, wherein the sense strand comprises one or more modified internucleotide linkages.

28. The double stranded nucleic acid of claim 27, wherein the sense strand comprises four modified internucleotide linkages.

29. The double stranded nucleic acid of claim 27 or 28, wherein the modified internucleotide linkages comprise one or more phosphorothioate (PS) internucleotide linkages.

30. The double stranded nucleic acid of claim 29, wherein each of the modified internucleotide linkages is a PS internucleotide linkage.

31. The double stranded nucleic acid of any one of claims 1 to 30, wherein the antisense strand comprises one or more modified internucleotide linkages.

32. The double stranded nucleic acid of claim 31, wherein the antisense strand comprises four modified internucleotide linkages.

33. The double stranded nucleic acid of claim 31 or 32, wherein the modified internucleotide linkages comprise one or more phosphorothioate (PS) internucleotide linkages.

34. The double stranded nucleic acid of claim 33, wherein each of the modified internucleotide linkages is a PS internucleotide linkage.

35. The double stranded nucleic acid of any one of claims 27 to 34, wherein positions 1 and 2 relative to the 5′ end of the sense strand are linked by a modified internucleotide linkage, optionally a phosphorothioate (PS) internucleotide linkage.

36. The double stranded nucleic acid of any one of claims 27 to 35, wherein positions 1 and 2 relative to the 5′ end of the antisense strand are linked by a modified internucleotide linkage, optionally a phosphorothioate (PS) internucleotide linkage.

37. The double stranded nucleic acid of any one of claims 27 to 36, wherein positions 2 and 3 relative to the 5′ end of the sense strand are linked by a modified internucleotide linkage, optionally a phosphorothioate (PS) internucleotide linkage.

38. The double stranded nucleic acid of any one of claims 27 to 37, wherein positions 2 and 3 relative to the 5′ end of the antisense strand are linked by a modified internucleotide linkage, optionally a phosphorothioate (PS) internucleotide linkage.

39. The double stranded nucleic acid of any one of claims 27 to 38, wherein at least two of positions 1, 2, and 3 of the 3′ end of the sense strand are linked by a modified internucleotide linkage, optionally a phosphorothioate (PS) internucleotide linkage.

40. The double stranded nucleic acid of any one of claims 27 to 39, wherein at least two of positions 1, 2, and 3 of the 3′ end of the antisense strand are linked by a modified internucleotide linkage, optionally a phosphorothioate (PS) internucleotide linkage.

41. The double stranded nucleic acid of any one of claims 27 to 40, wherein each of positions 1, 2, and 3 relative to the 3′ end of the sense strand are linked by a modified internucleotide linkage, optionally a phosphorothioate (PS) internucleotide linkage.

42. The double stranded nucleic acid of any one of claims 27 to 41, wherein each of positions 1, 2, and 3 relative to the 3′ end of the antisense strand are linked by a modified internucleotide linkage, optionally a phosphorothioate (PS) internucleotide linkage.

43. A conjugate comprising the double stranded nucleic acid of any one of claims 1 to 42.

44. The conjugate of claim 43, wherein the conjugate comprises a structure of Formula I, wherein Formula I comprises:
A-B-C Formula I,
wherein “A” of Formula I comprises the double-stranded nucleic acid, “B” of Formula I comprises a bond or a linker, and “C” of Formula I comprises a delivery molecule.

45. The conjugate of claim 44, wherein “B” of Formula I is connected to the 5′ end or the 3′ end of the sense strand of the double stranded nucleic acid.

46. The conjugate of claim 44 or 45, wherein “B” of Formula I is connected to the 3′ end of the sense strand of the double stranded nucleic acid.

47. The conjugate of claim 44, wherein “B” of Formula I is connected to the 5′ end or the 3′ end of the antisense strand of the double stranded nucleic acid.

48. The conjugate of any one of claims 44 to 47, wherein “B” of Formula I comprises a triethylene glycol (TEG) linker.

49. The conjugate of any one of claims 44 to 48, wherein “C” of Formula I comprises cholesterol.

50. The conjugate of any one of claims 44 to 48, wherein “C” of Formula I comprises tocopherol.

51. The conjugate of any one of claims 43 to 50, wherein the double stranded RNA does not comprise a nucleotide which is connected to: a maleimide group; a tertiary amide which is bonded to a gem-dimethyl (GDM) group; or a C₆—NH₂ group.

52. The conjugate of any one of claims 43 to 51, wherein “B” of Formula I does not comprise: a maleimide-methyl-tetrazine-trans-cyclo-octene (mal-tet-TCO) linker; a succinimidyl-4-(N-maleimidomethyl)cyclohexane-1-carboxylate (SMCC) linker; a linker comprising a tertiary amide which is bonded to a gem-dimethyl (GDM) group; or a linker comprising a C₆—NH₂ group.

53. The conjugate of any one of claims 43 to 47, wherein “B” of Formula I comprises a linker comprising a C₆—NH₂ group.

54. The conjugate of any one of claims 43 to 47, wherein “C” of Formula I comprises one or more N-acetylgalactosamine (GalNAc) moieties.

55. A pharmaceutical composition comprising the double stranded nucleic acid of any one of claims 1 to 42, or the conjugate of any one of claims 43 to 54, and a pharmaceutically acceptable carrier.

56. A method of inhibiting or reducing a target mRNA in a cell, the method comprising contacting the cell comprising the target mRNA with the double stranded nucleic acid of any one of claims 1 to 42, or the conjugate of any one of claims 43 to 54, or the pharmaceutical composition of claim 55.

57. The method of claim 56, wherein the cell is a mammalian cell, optionally a human cell.

58. The method of claim 56 or 57, wherein the cell is in a subject, optionally a human subject.

59. A double stranded nucleic acid comprising a sense strand comprising a sequence set forth in any one of Tables 1-5, and an antisense strand comprising a sequence set forth in any one of Tables 1-5.

60. The double stranded nucleic acid of claim 59, wherein
(i) the sense strand comprises the sequence set forth in any one of SEQ ID NOs: 1, 2, 3, 4, 9, 10, 11, 12, 13, 14, 15, 16, 17, 18, 19, 20, 21, 22, 23, 24, 25, 26, 27, 28, 29, 30, 31, 32, 33, 34, 35, 36, 37, 38, 39, 40, 41, 42, 77, 79, 80, 81, 82, 83, 84, 85, 86, 87, 88, 89, 90, 91, 92, 93, 94, 95, 96, 97, 98, 99, 100, 101, 102, 103, 104, 105, 106, 107, 108, 109, 110, 111, 145, 146, 152, 153, 154, 155, 156, 157, 158, 159, 160, 161, 162, 163, 164, 165, 166, 167, 168, 169, 170, 171, 172, 173, 174, or 175; and/or
(ii) the antisense strand comprises the sequence set forth in any one of SEQ ID NOs: 5, 6, 7, 8, 43, 44, 45, 46, 47, 48, 49, 50, 51, 52, 53, 54, 55, 56, 57, 58, 59, 60, 61, 62, 63, 64, 65, 66, 67, 68, 69, 70, 71, 72, 73, 74, 75, 76, 78, 112, 113, 114, 115, 116, 117, 118, 119, 120, 121, 122, 123, 124, 125, 126, 127, 128, 129, 130, 131, 132, 133, 134, 135, 136, 137, 138, 139, 140, 141, 142, 143, 144, 147, 148, 149, 150, 151, 176, 177, 178, 179, 180, 181, 182, 183, 184, 185, 186, 187, 188, 189, 190, 191, 192, 193, 194, 195, 196, 197, 198, or 199.

The application's sequence listing, which the Patent Office published only in electronic form, follows.

SEQUENCE LISTING (199 sequences)

SEQ ID NO: 1 - RNA, 21 nt, synthetic construct
  source 1..21: mol_type = other RNA
aggttctgtgggctgcgttga

SEQ ID NO: 2 - RNA, 21 nt, synthetic construct
  source 1..21: mol_type = other RNA
ggctgcgttgctggtcacata

SEQ ID NO: 3 - RNA, 21 nt, synthetic construct
  source 1..21: mol_type = other RNA
ggcctacaaatcggaactgga

SEQ ID NO: 4 - RNA, 21 nt, synthetic construct
  source 1..21: mol_type = other RNA
atggacgagaccatgaaggaa

SEQ ID NO: 5 - RNA, 23 nt, synthetic construct
  source 1..23: mol_type = other RNA
tcaacgcagcccacagaaccttc

SEQ ID NO: 6 - RNA, 23 nt, synthetic construct
  source 1..23: mol_type = other RNA
tatgtgaccagcaacgcagccca

SEQ ID NO: 7 - RNA, 23 nt, synthetic construct
  source 1..23: mol_type = other RNA
tccagttccgatttgtaggcctt

SEQ ID NO: 8 - RNA, 23 nt, synthetic construct
  source 1..23: mol_type = other RNA
ttccttcatggtctcgtccatca

SEQ ID NO: 9 - RNA, 21 nt, synthetic construct
  modified_base 1: mod_base = OTHER; note = 2prime-O-methyl Nucleotide
  modified_base 2: mod_base = OTHER; note = 2prime-O-methyl Nucleotide
  modified_base 3: mod_base = OTHER; note = 2prime-O-methyl Nucleotide
  modified_base 4: mod_base = OTHER; note = 2prime-O-methyl Nucleotide
  modified_base 5: mod_base = OTHER; note = 2prime-O-methyl Nucleotide
  modified_base 6: mod_base = OTHER; note = 2prime-O-methyl Nucleotide
  modified_base 7: mod_base = OTHER; note = 2prime Fluoro Nucleotide
  modified_base 8: mod_base = OTHER; note = 2prime-O-methyl Nucleotide
  modified_base 9: mod_base = OTHER; note = 2prime Fluoro Nucleotide
  modified_base 10: mod_base = OTHER; note = 2prime Fluoro Nucleotide
  modified_base 11: mod_base = OTHER; note = 2prime Fluoro Nucleotide
  modified_base 12: mod_base = OTHER; note = 2prime-O-methyl Nucleotide
  modified_base 13: mod_base = OTHER; note = 2prime-O-methyl Nucleotide
  modified_base 14: mod_base = OTHER; note = 2prime-O-methyl Nucleotide
  modified_base 15: mod_base = OTHER; note = 2prime-O-methyl Nucleotide
  modified_base 16: mod_base = OTHER; note = 2prime-O-methyl Nucleotide
  modified_base 17: mod_base = OTHER; note = 2prime-O-methyl Nucleotide
  modified_base 18: mod_base = OTHER; note = 2prime-O-methyl Nucleotide
  modified_base 19: mod_base = OTHER; note = 2prime-O-methyl Nucleotide
  modified_base 20: mod_base = OTHER; note = 2prime-O-methyl Nucleotide
  modified_base 21: mod_base = OTHER; note = 2prime-O-methyl Nucleotide
  source 1..21: mol_type = other RNA
  modified_base 1..2: mod_base = OTHER; note = Phosphorothioate Linkage
  modified_base 2..3: mod_base = OTHER; note = Phosphorothioate Linkage
  modified_base 19..20: mod_base = OTHER; note = Phosphorothioate Linkage
  modified_base 20..21: mod_base = OTHER; note = Phosphorothioate Linkage
aggttctgtgggctgcgttga

SEQ ID NO: 10 - RNA, 21 nt, synthetic construct
  modified_base 1: mod_base = OTHER; note = 2prime-O-methyl Nucleotide
  modified_base 2: mod_base = OTHER; note = 2prime-O-methyl Nucleotide
  modified_base 3: mod_base = OTHER; note = 2prime-O-methyl Nucleotide
  modified_base 4: mod_base = OTHER; note = 2prime-O-methyl Nucleotide
  modified_base 5: mod_base = OTHER; note = 2prime-O-methyl Nucleotide
  modified_base 6: mod_base = OTHER; note = 2prime-O-methyl Nucleotide
  modified_base 7: mod_base = OTHER; note = 2prime Fluoro Nucleotide
  modified_base 8: mod_base = OTHER; note = 2prime-O-methyl Nucleotide
  modified_base 9: mod_base = OTHER; note = 2prime Fluoro Nucleotide
  modified_base 10: mod_base = OTHER; note = 2prime Fluoro Nucleotide
  modified_base 11: mod_base = OTHER; note = 2prime Fluoro Nucleotide
  modified_base 12: mod_base = OTHER; note = 2prime-O-methyl Nucleotide
  modified_base 13: mod_base = OTHER; note = 2prime-O-methyl Nucleotide
  modified_base 14: mod_base = OTHER; note = 2prime-O-methyl Nucleotide
  modified_base 15: mod_base = OTHER; note = 2prime-O-methyl Nucleotide
  modified_base 16: mod_base = OTHER; note = 2prime-O-methyl Nucleotide
  modified_base 17: mod_base = OTHER; note = 2prime-O-methyl Nucleotide
  modified_base 18: mod_base = OTHER; note = 2prime-O-methyl Nucleotide
  modified_base 19: mod_base = OTHER; note = 2prime-O-methyl Nucleotide
  modified_base 20: mod_base = OTHER; note = 2prime-O-methyl Nucleotide
  modified_base 21: mod_base = OTHER; note = 2prime-O-methyl Nucleotide
  source 1..21: mol_type = other RNA
  modified_base 1..2: mod_base = OTHER; note = Phosphorothioate Linkage
  modified_base 2..3: mod_base = OTHER; note = Phosphorothioate Linkage
  modified_base 19..20: mod_base = OTHER; note = Phosphorothioate Linkage
  modified_base 20..21: mod_base = OTHER; note = Phosphorothioate Linkage
aggttctgtgggctgcgttga

SEQ ID NO: 11 - RNA, 21 nt, synthetic construct
  modified_base 1: mod_base = OTHER; note = 2prime-O-methyl Nucleotide
  modified_base 2: mod_base = OTHER; note = 2prime-O-methyl Nucleotide
  modified_base 3: mod_base = OTHER; note = 2prime-O-methyl Nucleotide
  modified_base 4: mod_base = OTHER; note = 2prime-O-methyl Nucleotide
  modified_base 5: mod_base = OTHER; note = 2prime-O-methyl Nucleotide
  modified_base 6: mod_base = OTHER; note = 2prime-O-methyl Nucleotide
  modified_base 7: mod_base = OTHER; note = 2prime Fluoro Nucleotide
  modified_base 8: mod_base = OTHER; note = 2prime-O-methyl Nucleotide
  modified_base 9: mod_base = OTHER; note = 2prime Fluoro Nucleotide
  modified_base 10: mod_base = OTHER; note = 2prime Fluoro Nucleotide
  modified_base 11: mod_base = OTHER; note = 2prime Fluoro Nucleotide
  modified_base 12: mod_base = OTHER; note = 2prime-O-methyl Nucleotide
  modified_base 13: mod_base = OTHER; note = 2prime-O-methyl Nucleotide
  modified_base 14: mod_base = OTHER; note = 2prime-O-methyl Nucleotide
  modified_base 15: mod_base = OTHER; note = 2prime-O-methyl Nucleotide
  modified_base 16: mod_base = OTHER; note = 2prime-O-methyl Nucleotide
  modified_base 17: mod_base = OTHER; note = 2prime-O-methyl Nucleotide
  modified_base 18: mod_base = OTHER; note = 2prime-O-methyl Nucleotide
  modified_base 19: mod_base = OTHER; note = 2prime-O-methyl Nucleotide
  modified_base 20: mod_base = OTHER; note = 2prime-O-methyl Nucleotide
  modified_base 21: mod_base = OTHER; note = 2prime-O-methyl Nucleotide
  source 1..21: mol_type = other RNA
  modified_base 1..2: mod_base = OTHER; note = Phosphorothioate Linkage
  modified_base 2..3: mod_base = OTHER; note = Phosphorothioate Linkage
  modified_base 19..20: mod_base = OTHER; note = Phosphorothioate Linkage
  modified_base 20..21: mod_base = OTHER; note = Phosphorothioate Linkage
aggttctgtgggctgcgttga

SEQ ID NO: 12 - RNA, 21 nt, synthetic construct
  modified_base 1: mod_base = OTHER; note = 2prime-O-methyl Nucleotide
  modified_base 2: mod_base = OTHER; note = 2prime-O-methyl Nucleotide
  modified_base 3: mod_base = OTHER; note = 2prime-O-methyl Nucleotide
  modified_base 4: mod_base = OTHER; note = 2prime-O-methyl Nucleotide
  modified_base 5: mod_base = OTHER; note = 2prime-O-methyl Nucleotide
  modified_base 6: mod_base = OTHER; note = 2prime-O-methyl Nucleotide
  modified_base 7: mod_base = OTHER; note = 2prime Fluoro Nucleotide
  modified_base 8: mod_base = OTHER; note = 2prime-O-methyl Nucleotide
  modified_base 9: mod_base = OTHER; note = 2prime Fluoro Nucleotide
  modified_base 10: mod_base = OTHER; note = 2prime Fluoro Nucleotide
  modified_base 11: mod_base = OTHER; note = 2prime Fluoro Nucleotide
  modified_base 12: mod_base = OTHER; note = 2prime-O-methyl Nucleotide
  modified_base 13: mod_base = OTHER; note = 2prime-O-methyl Nucleotide
  modified_base 14: mod_base = OTHER; note = 2prime-O-methyl Nucleotide
  modified_base 15: mod_base = OTHER; note = 2prime-O-methyl Nucleotide
  modified_base 16: mod_base = OTHER; note = 2prime-O-methyl Nucleotide
  modified_base 17: mod_base = OTHER; note = 2prime-O-methyl Nucleotide
  modified_base 18: mod_base = OTHER; note = 2prime-O-methyl Nucleotide
  modified_base 19: mod_base = OTHER; note = 2prime-O-methyl Nucleotide
  modified_base 20: mod_base = OTHER; note = 2prime-O-methyl Nucleotide
  modified_base 21: mod_base = OTHER; note = 2prime-O-methyl Nucleotide
  source 1..21: mol_type = other RNA
  modified_base 1..2: mod_base = OTHER; note = Phosphorothioate Linkage
  modified_base 2..3: mod_base = OTHER; note = Phosphorothioate Linkage
  modified_base 19..20: mod_base = OTHER; note = Phosphorothioate Linkage
  modified_base 20..21: mod_base = OTHER; note = Phosphorothioate Linkage
aggttctgtgggctgcgttga

SEQ ID NO: 13 - RNA, 21 nt, synthetic construct
  modified_base 1: mod_base = OTHER; note = 2prime-O-methyl Nucleotide
  modified_base 2: mod_base = OTHER; note = 2prime-O-methyl Nucleotide
  modified_base 3: mod_base = OTHER; note = 2prime-O-methyl Nucleotide
  modified_base 4: mod_base = OTHER; note = 2prime-O-methyl Nucleotide
  modified_base 5: mod_base = OTHER; note = 2prime-O-methyl Nucleotide
  modified_base 6: mod_base = OTHER; note = 2prime-O-methyl Nucleotide
  modified_base 7: mod_base = OTHER; note = 2prime Fluoro Nucleotide
  modified_base 8: mod_base = OTHER; note = 2prime-O-methyl Nucleotide
  modified_base 9: mod_base = OTHER; note = 2prime Fluoro Nucleotide
  modified_base 10: mod_base = OTHER; note = 2prime Fluoro Nucleotide
  modified_base 11: mod_base = OTHER; note = 2prime Fluoro Nucleotide
  modified_base 12: mod_base = OTHER; note = 2prime-O-methyl Nucleotide
  modified_base 13: mod_base = OTHER; note = 2prime-O-methyl Nucleotide
  modified_base 14: mod_base = OTHER; note = 2prime-O-methyl Nucleotide
  modified_base 15: mod_base = OTHER; note = 2prime-O-methyl Nucleotide
  modified_base 16: mod_base = OTHER; note = 2prime-O-methyl Nucleotide
  modified_base 17: mod_base = OTHER; note = 2prime-O-methyl Nucleotide
  modified_base 18: mod_base = OTHER; note = 2prime-O-methyl Nucleotide
  modified_base 19: mod_base = OTHER; note = 2prime-O-methyl Nucleotide
  modified_base 20: mod_base = OTHER; note = 2prime-O-methyl Nucleotide
  modified_base 21: mod_base = OTHER; note = 2prime-O-methyl Nucleotide
  source 1..21: mol_type = other RNA
  modified_base 1..2: mod_base = OTHER; note = Phosphorothioate Linkage
  modified_base 2..3: mod_base = OTHER; note = Phosphorothioate Linkage
  modified_base 19..20: mod_base = OTHER; note = Phosphorothioate Linkage
  modified_base 20..21: mod_base = OTHER; note = Phosphorothioate Linkage
aggttctgtgggctgcgttga

SEQ ID NO: 14 - RNA, 21 nt, synthetic construct
  modified_base 1: mod_base = OTHER; note = 2prime-O-methyl Nucleotide
  modified_base 2: mod_base = OTHER; note = 2prime-O-methyl Nucleotide
  modified_base 3: mod_base = OTHER; note = 2prime-O-methyl Nucleotide
  modified_base 4: mod_base = OTHER; note = 2prime-O-methyl Nucleotide
  modified_base 5: mod_base = OTHER; note = 2prime-O-methyl Nucleotide
  modified_base 6: mod_base = OTHER; note = 2prime-O-methyl Nucleotide
  modified_base 7: mod_base = OTHER; note = 2prime Fluoro Nucleotide
  modified_base 8: mod_base = OTHER; note = 2prime-O-methyl Nucleotide
  modified_base 9: mod_base = OTHER; note = 2prime Fluoro Nucleotide
  modified_base 10: mod_base = OTHER; note = 2prime Fluoro Nucleotide
  modified_base 11: mod_base = OTHER; note = 2prime Fluoro Nucleotide
  modified_base 12: mod_base = OTHER; note = 2prime-O-methyl Nucleotide
  modified_base 13: mod_base = OTHER; note = 2prime-O-methyl Nucleotide
  modified_base 14: mod_base = OTHER; note = 2prime-O-methyl Nucleotide
  modified_base 15: mod_base = OTHER; note = 2prime-O-methyl Nucleotide
  modified_base 16: mod_base = OTHER; note = 2prime-O-methyl Nucleotide
  modified_base 17: mod_base = OTHER; note = 2prime-O-methyl Nucleotide
  modified_base 18: mod_base = OTHER; note = 2prime-O-methyl Nucleotide
  modified_base 19: mod_base = OTHER; note = 2prime-O-methyl Nucleotide
  modified_base 20: mod_base = OTHER; note = 2prime-O-methyl Nucleotide
  modified_base 21: mod_base = OTHER; note = 2prime-O-methyl Nucleotide
  source 1..21: mol_type = other RNA
  modified_base 1..2: mod_base = OTHER; note = Phosphorothioate Linkage
  modified_base 2..3: mod_base = OTHER; note = Phosphorothioate Linkage
  modified_base 19..20: mod_base = OTHER; note = Phosphorothioate Linkage
  modified_base 20..21: mod_base = OTHER; note = Phosphorothioate Linkage
aggttctgtgggctgcgttga

SEQ ID NO: 15 - RNA, 21 nt, synthetic construct
  source 1..21: mol_type = other RNA
  modified_base 1: mod_base = OTHER; note = 2prime-O-methyl Nucleotide
  modified_base 1..2: mod_base = OTHER; note = Phosphorothioate Linkage
  modified_base 2: mod_base = OTHER; note = 2prime-O-methyl Nucleotide
  modified_base 2..3: mod_base = OTHER; note = Phosphorothioate Linkage
  modified_base 3: mod_base = OTHER; note = 2prime-O-methyl Nucleotide
  modified_base 4: mod_base = OTHER; note = 2prime-O-methyl Nucleotide
  modified_base 5: mod_base = OTHER; note = 2prime-O-methyl Nucleotide
  modified_base 6: mod_base = OTHER; note = 2prime-O-methyl Nucleotide
  modified_base 7: mod_base = OTHER; note = 2prime-O-methyl Nucleotide
  modified_base 8: mod_base = OTHER; note = 2prime-O-methyl Nucleotide
  modified_base 9: mod_base = OTHER; note = 2prime Fluoro Nucleotide
  modified_base 10: mod_base = OTHER; note = 2prime Fluoro Nucleotide
  modified_base 11: mod_base = OTHER; note = 2prime Fluoro Nucleotide
  modified_base 12: mod_base = OTHER; note = 2prime-O-methyl Nucleotide
  modified_base 13: mod_base = OTHER; note = 2prime-O-methyl Nucleotide
  modified_base 14: mod_base = OTHER; note = 2prime-O-methyl Nucleotide
  modified_base 15: mod_base = OTHER; note = 2prime-O-methyl Nucleotide
  modified_base 16: mod_base = OTHER; note = 2prime-O-methyl Nucleotide
  modified_base 17: mod_base = OTHER; note = 2prime-O-methyl Nucleotide
  modified_base 18: mod_base = OTHER; note = 2prime-O-methyl Nucleotide
  modified_base 19: mod_base = OTHER; note = 2prime-O-methyl Nucleotide
  modified_base 19..20: mod_base = OTHER; note = Phosphorothioate Linkage
  modified_base 20: mod_base = OTHER; note = 2prime-O-methyl Nucleotide
  modified_base 20..21: mod_base = OTHER; note = Phosphorothioate Linkage
  modified_base 21: mod_base = OTHER; note = 2prime-O-methyl Nucleotide
aggttctgtgggctgcgttga

SEQ ID NO: 16 - RNA, 21 nt, synthetic construct
  source 1..21: mol_type = other RNA
  modified_base 1: mod_base = OTHER; note = 2prime-O-methyl Nucleotide
  modified_base 1..2: mod_base = OTHER; note = Phosphorothioate Linkage
  modified_base 2: mod_base = OTHER; note = 2prime-O-methyl Nucleotide
  modified_base 2..3: mod_base = OTHER; note = Phosphorothioate Linkage
  modified_base 3: mod_base = OTHER; note = 2prime-O-methyl Nucleotide
  modified_base 4: mod_base = OTHER; note = 2prime-O-methyl Nucleotide
  modified_base 5: mod_base = OTHER; note = 2prime-O-methyl Nucleotide
  modified_base 6: mod_base = OTHER; note = 2prime-O-methyl Nucleotide
  modified_base 7: mod_base = OTHER; note = 2prime Fluoro Nucleotide
  modified_base 8: mod_base = OTHER; note = 2prime-O-methyl Nucleotide
  modified_base 9: mod_base = OTHER; note = 2prime Fluoro Nucleotide
  modified_base 10: mod_base = OTHER; note = 2prime Fluoro Nucleotide
  modified_base 11: mod_base = OTHER; note = 2prime Fluoro Nucleotide
  modified_base 12: mod_base = OTHER; note = 2prime-O-methyl Nucleotide
  modified_base 13: mod_base = OTHER; note = 2prime-O-methyl Nucleotide
  modified_base 14: mod_base = OTHER; note = 2prime-O-methyl Nucleotide
  modified_base 15: mod_base = OTHER; note = 2prime-O-methyl Nucleotide
  modified_base 16: mod_base = OTHER; note = 2prime-O-methyl Nucleotide
  modified_base 17: mod_base = OTHER; note = 2prime-O-methyl Nucleotide
  modified_base 18: mod_base = OTHER; note = 2prime-O-methyl Nucleotide
  modified_base 19: mod_base = OTHER; note = 2prime-O-methyl Nucleotide
  modified_base 19..20: mod_base = OTHER; note = Phosphorothioate Linkage
  modified_base 20: mod_base = OTHER; note = 2prime-O-methyl Nucleotide
  modified_base 20..21: mod_base = OTHER; note = Phosphorothioate Linkage
  modified_base 21: mod_base = OTHER; note = 2prime-O-methyl Nucleotide
ggctgcgttgctggtcacata

SEQ ID NO: 17 - RNA, 21 nt, synthetic construct
  source 1..21: mol_type = other RNA
  modified_base 1: mod_base = OTHER; note = 2prime-O-methyl Nucleotide
  modified_base 1..2: mod_base = OTHER; note = Phosphorothioate Linkage
  modified_base 2: mod_base = OTHER; note = 2prime-O-methyl Nucleotide
  modified_base 2..3: mod_base = OTHER; note = Phosphorothioate Linkage
  modified_base 3: mod_base = OTHER; note = 2prime-O-methyl Nucleotide
  modified_base 4: mod_base = OTHER; note = 2prime-O-methyl Nucleotide
  modified_base 5: mod_base = OTHER; note = 2prime-O-methyl Nucleotide
  modified_base 6: mod_base = OTHER; note = 2prime-O-methyl Nucleotide
  modified_base 7: mod_base = OTHER; note = 2prime Fluoro Nucleotide
  modified_base 8: mod_base = OTHER; note = 2prime-O-methyl Nucleotide
  modified_base 9: mod_base = OTHER; note = 2prime Fluoro Nucleotide
  modified_base 10: mod_base = OTHER; note = 2prime Fluoro Nucleotide
  modified_base 11: mod_base = OTHER; note = 2prime Fluoro Nucleotide
  modified_base 12: mod_base = OTHER; note = 2prime-O-methyl Nucleotide
  modified_base 13: mod_base = OTHER; note = 2prime-O-methyl Nucleotide
  modified_base 14: mod_base = OTHER; note = 2prime-O-methyl Nucleotide
  modified_base 15: mod_base = OTHER; note = 2prime-O-methyl Nucleotide
  modified_base 16: mod_base = OTHER; note = 2prime-O-methyl Nucleotide
  modified_base 17: mod_base = OTHER; note = 2prime-O-methyl Nucleotide
  modified_base 18: mod_base = OTHER; note = 2prime-O-methyl Nucleotide
  modified_base 19: mod_base = OTHER; note = 2prime-O-methyl Nucleotide
  modified_base 19..20: mod_base = OTHER; note = Phosphorothioate Linkage
  modified_base 20: mod_base = OTHER; note = 2prime-O-methyl Nucleotide
  modified_base 20..21: mod_base = OTHER; note = Phosphorothioate Linkage
  modified_base 21: mod_base = OTHER; note = 2prime-O-methyl Nucleotide
ggctgcgttgctggtcacata

SEQ ID NO: 18 - RNA, 21 nt, synthetic construct
  source 1..21: mol_type = other RNA
  modified_base 1: mod_base = OTHER; note = 2prime-O-methyl Nucleotide
  modified_base 1..2: mod_base = OTHER; note = Phosphorothioate Linkage
  modified_base 2: mod_base = OTHER; note = 2prime-O-methyl Nucleotide
  modified_base 2..3: mod_base = OTHER; note = Phosphorothioate Linkage
  modified_base 3: mod_base = OTHER; note = 2prime-O-methyl Nucleotide
  modified_base 4: mod_base = OTHER; note = 2prime-O-methyl Nucleotide
  modified_base 5: mod_base = OTHER; note = 2prime-O-methyl Nucleotide
  modified_base 6: mod_base = OTHER; note = 2prime-O-methyl Nucleotide
  modified_base 7: mod_base = OTHER; note = 2prime Fluoro Nucleotide
  modified_base 8: mod_base = OTHER; note = 2prime-O-methyl Nucleotide
  modified_base 9: mod_base = OTHER; note = 2prime Fluoro Nucleotide
  modified_base 10: mod_base = OTHER; note = 2prime Fluoro Nucleotide
  modified_base 11: mod_base = OTHER; note = 2prime Fluoro Nucleotide
  modified_base 12: mod_base = OTHER; note = 2prime-O-methyl Nucleotide
  modified_base 13: mod_base = OTHER; note = 2prime-O-methyl Nucleotide
  modified_base 14: mod_base = OTHER; note = 2prime-O-methyl Nucleotide
  modified_base 15: mod_base = OTHER; note = 2prime-O-methyl Nucleotide
  modified_base 16: mod_base = OTHER; note = 2prime-O-methyl Nucleotide
  modified_base 17: mod_base = OTHER; note = 2prime-O-methyl Nucleotide
  modified_base 18: mod_base = OTHER; note = 2prime-O-methyl Nucleotide
  modified_base 19: mod_base = OTHER; note = 2prime-O-methyl Nucleotide
  modified_base 19..20: mod_base = OTHER; note = Phosphorothioate Linkage
  modified_base 20: mod_base = OTHER; note = 2prime-O-methyl Nucleotide
  modified_base 20..21: mod_base = OTHER; note = Phosphorothioate Linkage
  modified_base 21: mod_base = OTHER; note = 2prime-O-methyl Nucleotide
ggctgcgttgctggtcacata

SEQ ID NO: 19 - RNA, 21 nt, synthetic construct
  source 1..21: mol_type = other RNA
  modified_base 1: mod_base = OTHER; note = 2prime-O-methyl Nucleotide
  modified_base 1..2: mod_base = OTHER; note = Phosphorothioate Linkage
  modified_base 2: mod_base = OTHER; note = 2prime-O-methyl Nucleotide
  modified_base 2..3: mod_base = OTHER; note = Phosphorothioate Linkage
  modified_base 3: mod_base = OTHER; note = 2prime-O-methyl Nucleotide
  modified_base 4: mod_base = OTHER; note = 2prime-O-methyl Nucleotide
  modified_base 5: mod_base = OTHER; note = 2prime-O-methyl Nucleotide
  modified_base 6: mod_base = OTHER; note = 2prime-O-methyl Nucleotide
  modified_base 7: mod_base = OTHER; note = 2prime Fluoro Nucleotide
  modified_base 8: mod_base = OTHER; note = 2prime-O-methyl Nucleotide
  modified_base 9: mod_base = OTHER; note = 2prime Fluoro Nucleotide
  modified_base 10: mod_base = OTHER; note = 2prime Fluoro Nucleotide
  modified_base 11: mod_base = OTHER; note = 2prime Fluoro Nucleotide
  modified_base 12: mod_base = OTHER; note = 2prime-O-methyl Nucleotide
  modified_base 13: mod_base = OTHER; note = 2prime-O-methyl Nucleotide
  modified_base 14: mod_base = OTHER; note = 2prime-O-methyl Nucleotide
  modified_base 15: mod_base = OTHER; note = 2prime-O-methyl Nucleotide
  modified_base 16: mod_base = OTHER; note = 2prime-O-methyl Nucleotide
  modified_base 17: mod_base = OTHER; note = 2prime-O-methyl Nucleotide
  modified_base 18: mod_base = OTHER; note = 2prime-O-methyl Nucleotide
  modified_base 19: mod_base = OTHER; note = 2prime-O-methyl Nucleotide
  modified_base 19..20: mod_base = OTHER; note = Phosphorothioate Linkage
  modified_base 20: mod_base = OTHER; note = 2prime-O-methyl Nucleotide
  modified_base 20..21: mod_base = OTHER; note = Phosphorothioate Linkage
  modified_base 21: mod_base = OTHER; note = 2prime-O-methyl Nucleotide
ggctgcgttgctggtcacata

SEQ ID NO: 20 - RNA, 21 nt, synthetic construct
  source 1..21: mol_type = other RNA
  modified_base 1: mod_base = OTHER; note = 2prime-O-methyl Nucleotide
  modified_base 1..2: mod_base = OTHER; note = Phosphorothioate Linkage
  modified_base 2: mod_base = OTHER; note = 2prime-O-methyl Nucleotide
  modified_base 2..3: mod_base = OTHER; note = Phosphorothioate Linkage
  modified_base 3: mod_base = OTHER; note = 2prime-O-methyl Nucleotide
  modified_base 4: mod_base = OTHER; note = 2prime-O-methyl Nucleotide
  modified_base 5: mod_base = OTHER; note = 2prime-O-methyl Nucleotide
  modified_base 6: mod_base = OTHER; note = 2prime-O-methyl Nucleotide
  modified_base 7: mod_base = OTHER; note = 2prime Fluoro Nucleotide
  modified_base 8: mod_base = OTHER; note = 2prime-O-methyl Nucleotide
  modified_base 9: mod_base = OTHER; note = 2prime Fluoro Nucleotide
  modified_base 10: mod_base = OTHER; note = 2prime Fluoro Nucleotide
  modified_base 11: mod_base = OTHER; note = 2prime Fluoro Nucleotide
  modified_base 12: mod_base = OTHER; note = 2prime-O-methyl Nucleotide
  modified_base 13: mod_base = OTHER; note = 2prime-O-methyl Nucleotide
  modified_base 14: mod_base = OTHER; note = 2prime-O-methyl Nucleotide
  modified_base 15: mod_base = OTHER; note = 2prime-O-methyl Nucleotide
  modified_base 16: mod_base = OTHER; note = 2prime-O-methyl Nucleotide
  modified_base 17: mod_base = OTHER; note = 2prime-O-methyl Nucleotide
  modified_base 18: mod_base = OTHER; note = 2prime-O-methyl Nucleotide
  modified_base 19: mod_base = OTHER; note = 2prime-O-methyl Nucleotide
  modified_base 19..20: mod_base = OTHER; note = Phosphorothioate Linkage
  modified_base 20: mod_base = OTHER; note = 2prime-O-methyl Nucleotide
  modified_base 20..21: mod_base = OTHER; note = Phosphorothioate Linkage
  modified_base 21: mod_base = OTHER; note = 2prime-O-methyl Nucleotide
ggctgcgttgctggtcacata

SEQ ID NO: 21 - RNA, 21 nt, synthetic construct
  source 1..21: mol_type = other RNA
  modified_base 1: mod_base = OTHER; note = 2prime-O-methyl Nucleotide
  modified_base 1..2: mod_base = OTHER; note = Phosphorothioate Linkage
  modified_base 2: mod_base = OTHER; note = 2prime-O-methyl Nucleotide
  modified_base 2..3: mod_base = OTHER; note = Phosphorothioate Linkage
  modified_base 3: mod_base = OTHER; note = 2prime-O-methyl Nucleotide
  modified_base 4: mod_base = OTHER; note = 2prime-O-methyl Nucleotide
  modified_base 5: mod_base = OTHER; note = 2prime-O-methyl Nucleotide
  modified_base 6: mod_base = OTHER; note = 2prime-O-methyl Nucleotide
  modified_base 7: mod_base = OTHER; note = 2prime Fluoro Nucleotide
  modified_base 8: mod_base = OTHER; note = 2prime-O-methyl Nucleotide
  modified_base 9: mod_base = OTHER; note = 2prime Fluoro Nucleotide
  modified_base 10: mod_base = OTHER; note = 2prime Fluoro Nucleotide
  modified_base 11: mod_base = OTHER; note = 2prime Fluoro Nucleotide
  modified_base 12: mod_base = OTHER; note = 2prime-O-methyl Nucleotide
  modified_base 13: mod_base = OTHER; note = 2prime-O-methyl Nucleotide
  modified_base 14: mod_base = OTHER; note = 2prime-O-methyl Nucleotide
  modified_base 15: mod_base = OTHER; note = 2prime-O-methyl Nucleotide
  modified_base 16: mod_base = OTHER; note = 2prime-O-methyl Nucleotide
  modified_base 17: mod_base = OTHER; note = 2prime-O-methyl Nucleotide
  modified_base 18: mod_base = OTHER; note = 2prime-O-methyl Nucleotide
  modified_base 19: mod_base = OTHER; note = 2prime-O-methyl Nucleotide
  modified_base 19..20: mod_base = OTHER; note = Phosphorothioate Linkage
  modified_base 20: mod_base = OTHER; note = 2prime-O-methyl Nucleotide
  modified_base 20..21: mod_base = OTHER; note = Phosphorothioate Linkage
  modified_base 21: mod_base = OTHER; note = 2prime-O-methyl Nucleotide
ggctgcgttgctggtcacata

SEQ ID NO: 22 - RNA, 21 nt, synthetic construct
  source 1..21: mol_type = other RNA
  modified_base 1: mod_base = OTHER; note = 2prime-O-methyl Nucleotide
  modified_base 1..2: mod_base = OTHER; note = Phosphorothioate Linkage
  modified_base 2: mod_base = OTHER; note = 2prime-O-methyl Nucleotide
  modified_base 2..3: mod_base = OTHER; note = Phosphorothioate Linkage
  modified_base 3: mod_base = OTHER; note = 2prime-O-methyl Nucleotide
  modified_base 4: mod_base = OTHER; note = 2prime-O-methyl Nucleotide
  modified_base 5: mod_base = OTHER; note = 2prime-O-methyl Nucleotide
  modified_base 6: mod_base = OTHER; note = 2prime-O-methyl Nucleotide
  modified_base 7: mod_base = OTHER; note = 2prime Fluoro Nucleotide
  modified_base 8: mod_base = OTHER; note = 2prime-O-methyl Nucleotide
  modified_base 9: mod_base = OTHER; note = 2prime Fluoro Nucleotide
  modified_base 10: mod_base = OTHER; note = 2prime Fluoro Nucleotide
  modified_base 11: mod_base = OTHER; note = 2prime Fluoro Nucleotide
  modified_base 12: mod_base = OTHER; note = 2prime-O-methyl Nucleotide
  modified_base 13: mod_base = OTHER; note = 2prime-O-methyl Nucleotide
  modified_base 14: mod_base = OTHER; note = 2prime-O-methyl Nucleotide
  modified_base 15: mod_base = OTHER; note = 2prime-O-methyl Nucleotide
  modified_base 16: mod_base = OTHER; note = 2prime-O-methyl Nucleotide
  modified_base 17: mod_base = OTHER; note = 2prime-O-methyl Nucleotide
  modified_base 18: mod_base = OTHER; note = 2prime-O-methyl Nucleotide
  modified_base 19: mod_base = OTHER; note = 2prime-O-methyl Nucleotide
  modified_base 19..20: mod_base = OTHER; note = Phosphorothioate Linkage
  modified_base 20: mod_base = OTHER; note = 2prime-O-methyl Nucleotide
  modified_base 20..21: mod_base = OTHER; note = Phosphorothioate Linkage
  modified_base 21: mod_base = OTHER; note = 2prime-O-methyl Nucleotide
ggctgcgttgctggtcacata

SEQ ID NO: 23 - RNA, 21 nt, synthetic construct
  source 1..21: mol_type = other RNA
  modified_base 1: mod_base = OTHER; note = 2prime-O-methyl Nucleotide
  modified_base 1..2: mod_base = OTHER; note = Phosphorothioate Linkage
  modified_base 2: mod_base = OTHER; note = 2prime-O-methyl Nucleotide
  modified_base 2..3: mod_base = OTHER; note = Phosphorothioate Linkage
  modified_base 3: mod_base = OTHER; note = 2prime-O-methyl Nucleotide
  modified_base 4: mod_base = OTHER; note = 2prime-O-methyl Nucleotide
  modified_base 5: mod_base = OTHER; note = 2prime-O-methyl Nucleotide
  modified_base 6: mod_base = OTHER; note = 2prime-O-methyl Nucleotide
  modified_base 7: mod_base = OTHER; note = 2prime Fluoro Nucleotide
  modified_base 8: mod_base = OTHER; note = 2prime-O-methyl Nucleotide
  modified_base 9: mod_base = OTHER; note = 2prime Fluoro Nucleotide
  modified_base 10: mod_base = OTHER; note = 2prime Fluoro Nucleotide
  modified_base 11: mod_base = OTHER; note = 2prime Fluoro Nucleotide
  modified_base 12: mod_base = OTHER; note = 2prime-O-methyl Nucleotide
  modified_base 13: mod_base = OTHER; note = 2prime-O-methyl Nucleotide
  modified_base 14: mod_base = OTHER; note = 2prime-O-methyl Nucleotide
  modified_base 15: mod_base = OTHER; note = 2prime-O-methyl Nucleotide
  modified_base 16: mod_base = OTHER; note = 2prime-O-methyl Nucleotide
  modified_base 17: mod_base = OTHER; note = 2prime-O-methyl Nucleotide
  modified_base 18: mod_base = OTHER; note = 2prime-O-methyl Nucleotide
  modified_base 19: mod_base = OTHER; note = 2prime-O-methyl Nucleotide
  modified_base 19..20: mod_base = OTHER; note = Phosphorothioate Linkage
  modified_base 20: mod_base = OTHER; note = 2prime-O-methyl Nucleotide
  modified_base 20..21: mod_base = OTHER; note = Phosphorothioate Linkage
  modified_base 21: mod_base = OTHER; note = 2prime-O-methyl Nucleotide
ggctgcgttgctggtcacata

SEQ ID NO: 24 - RNA, 21 nt, synthetic construct
  source 1..21: mol_type = other RNA
  modified_base 1: mod_base = OTHER; note = 2prime-O-methyl Nucleotide
  modified_base 1..2: mod_base = OTHER; note = Phosphorothioate Linkage
  modified_base 2: mod_base = OTHER; note = 2prime-O-methyl Nucleotide
  modified_base 2..3: mod_base = OTHER; note = Phosphorothioate Linkage
  modified_base 3: mod_base = OTHER; note = 2prime-O-methyl Nucleotide
  modified_base 4: mod_base = OTHER; note = 2prime-O-methyl Nucleotide
  modified_base 5: mod_base = OTHER; note = 2prime-O-methyl Nucleotide
  modified_base 6: mod_base = OTHER; note = 2prime-O-methyl Nucleotide
  modified_base 7: mod_base = OTHER; note = 2prime Fluoro Nucleotide
  modified_base 8: mod_base = OTHER; note = 2prime-O-methyl Nucleotide
  modified_base 9: mod_base = OTHER; note = 2prime Fluoro Nucleotide
  modified_base 10: mod_base = OTHER; note = 2prime Fluoro Nucleotide
  modified_base 11: mod_base = OTHER; note = 2prime Fluoro Nucleotide
  modified_base 12: mod_base = OTHER; note = 2prime-O-methyl Nucleotide
  modified_base 13: mod_base = OTHER; note = 2prime-O-methyl Nucleotide
  modified_base 14: mod_base = OTHER; note = 2prime-O-methyl Nucleotide
  modified_base 15: mod_base = OTHER; note = 2prime-O-methyl Nucleotide
  modified_base 16: mod_base = OTHER; note = 2prime-O-methyl Nucleotide
  modified_base 17: mod_base = OTHER; note = 2prime-O-methyl Nucleotide
  modified_base 18: mod_base = OTHER; note = 2prime-O-methyl Nucleotide
  modified_base 19: mod_base = OTHER; note = 2prime-O-methyl Nucleotide
  modified_base 19..20: mod_base = OTHER; note = Phosphorothioate Linkage
  modified_base 20: mod_base = OTHER; note = 2prime-O-methyl Nucleotide
  modified_base 20..21: mod_base = OTHER; note = Phosphorothioate Linkage
  modified_base 21: mod_base = OTHER; note = 2prime-O-methyl Nucleotide
ggctgcgttgctggtcacata

SEQ ID NO: 25 - RNA, 21 nt, synthetic construct
  source 1..21: mol_type = other RNA
  modified_base 1: mod_base = OTHER; note = 2prime-O-methyl Nucleotide
  modified_base 1..2: mod_base = OTHER; note = Phosphorothioate Linkage
  modified_base 2: mod_base = OTHER; note = 2prime-O-methyl Nucleotide
  modified_base 2..3: mod_base = OTHER; note = Phosphorothioate Linkage
  modified_base 3: mod_base = OTHER; note = 2prime-O-methyl Nucleotide
  modified_base 4: mod_base = OTHER; note = 2prime-O-methyl Nucleotide
  modified_base 5: mod_base = OTHER; note = 2prime-O-methyl Nucleotide
  modified_base 6: mod_base = OTHER; note = 2prime-O-methyl Nucleotide
  modified_base 7: mod_base = OTHER; note = 2prime Fluoro Nucleotide
  modified_base 8: mod_base = OTHER; note = 2prime-O-methyl Nucleotide
  modified_base 9: mod_base = OTHER; note = 2prime Fluoro Nucleotide
  modified_base 10: mod_base = OTHER; note = 2prime Fluoro Nucleotide
  modified_base 11: mod_base = OTHER; note = 2prime Fluoro Nucleotide
  modified_base 12: mod_base = OTHER; note = 2prime-O-methyl Nucleotide
  modified_base 13: mod_base = OTHER; note = 2prime-O-methyl Nucleotide
  modified_base 14: mod_base = OTHER; note = 2prime-O-methyl Nucleotide
  modified_base 15: mod_base = OTHER; note = 2prime-O-methyl Nucleotide
  modified_base 16: mod_base = OTHER; note = 2prime-O-methyl Nucleotide
  modified_base 17: mod_base = OTHER; note = 2prime-O-methyl Nucleotide
  modified_base 18: mod_base = OTHER; note = 2prime-O-methyl Nucleotide
  modified_base 19: mod_base = OTHER; note = 2prime-O-methyl Nucleotide
  modified_base 19..20: mod_base = OTHER; note = Phosphorothioate Linkage
  modified_base 20: mod_base = OTHER; note = 2prime-O-methyl Nucleotide
  modified_base 20..21: mod_base = OTHER; note = Phosphorothioate Linkage
  modified_base 21: mod_base = OTHER; note = 2prime-O-methyl Nucleotide
ggctgcgttgctggtcacata

SEQ ID NO: 26 - RNA, 21 nt, synthetic construct
  source 1..21: mol_type = other RNA
  modified_base 1: mod_base = OTHER; note = 2prime-O-methyl Nucleotide
  modified_base 1..2: mod_base = OTHER; note = Phosphorothioate Linkage
  modified_base 2: mod_base = OTHER; note = 2prime-O-methyl Nucleotide
  modified_base 2..3: mod_base = OTHER; note = Phosphorothioate Linkage
  modified_base 3: mod_base = OTHER; note = 2prime-O-methyl Nucleotide
  modified_base 4: mod_base = OTHER; note = 2prime-O-methyl Nucleotide
  modified_base 5: mod_base = OTHER; note = 2prime-O-methyl Nucleotide
  modified_base 6: mod_base = OTHER; note = 2prime-O-methyl Nucleotide
  modified_base 7: mod_base = OTHER; note = 2prime Fluoro Nucleotide
  modified_base 8: mod_base = OTHER; note = 2prime-O-methyl Nucleotide
  modified_base 9: mod_base = OTHER; note = 2prime Fluoro Nucleotide
  modified_base 10: mod_base = OTHER; note = 2prime Fluoro Nucleotide
  modified_base 11: mod_base = OTHER; note = 2prime Fluoro Nucleotide
  modified_base 12: mod_base = OTHER; note = 2prime-O-methyl Nucleotide
  modified_base 13: mod_base = OTHER; note = 2prime-O-methyl Nucleotide
  modified_base 14: mod_base = OTHER; note = 2prime-O-methyl Nucleotide
  modified_base 15: mod_base = OTHER; note = 2prime-O-methyl Nucleotide
  modified_base 16: mod_base = OTHER; note = 2prime-O-methyl Nucleotide
  modified_base 17: mod_base = OTHER; note = 2prime-O-methyl Nucleotide
  modified_base 18: mod_base = OTHER; note = 2prime-O-methyl Nucleotide
  modified_base 19: mod_base = OTHER; note = 2prime-O-methyl Nucleotide
  modified_base 19..20: mod_base = OTHER; note = Phosphorothioate Linkage
  modified_base 20: mod_base = OTHER; note = 2prime-O-methyl Nucleotide
  modified_base 20..21: mod_base = OTHER; note = Phosphorothioate Linkage
  modified_base 21: mod_base = OTHER; note = 2prime-O-methyl Nucleotide
ggctgcgttgctggtcacata

SEQ ID NO: 27 - RNA, 21 nt, synthetic construct
  source 1..21: mol_type = other RNA
  modified_base 1: mod_base = OTHER; note = 2prime-O-methyl Nucleotide
  modified_base 1..2: mod_base = OTHER; note = Phosphorothioate Linkage
  modified_base 2: mod_base = OTHER; note = 2prime-O-methyl Nucleotide
  modified_base 2..3: mod_base = OTHER; note = Phosphorothioate Linkage
  modified_base 3: mod_base = OTHER; note = 2prime-O-methyl Nucleotide
  modified_base 4: mod_base = OTHER; note = 2prime-O-methyl Nucleotide
  modified_base 5: mod_base = OTHER; note = 2prime-O-methyl Nucleotide
  modified_base 6: mod_base = OTHER; note = 2prime-O-methyl Nucleotide
  modified_base 7: mod_base = OTHER; note = 2prime Fluoro Nucleotide
  modified_base 8: mod_base = OTHER; note = 2prime-O-methyl Nucleotide
  modified_base 9: mod_base = OTHER; note = 2prime Fluoro Nucleotide
  modified_base 10: mod_base = OTHER; note = 2prime Fluoro Nucleotide
  modified_base 11: mod_base = OTHER; note = 2prime Fluoro Nucleotide
  modified_base 12: mod_base = OTHER; note = 2prime-O-methyl Nucleotide
  modified_base 13: mod_base = OTHER; note = 2prime-O-methyl Nucleotide
  modified_base 14: mod_base = OTHER; note = 2prime-O-methyl Nucleotide
  modified_base 15: mod_base = OTHER; note = 2prime-O-methyl Nucleotide
  modified_base 16: mod_base = OTHER; note = 2prime-O-methyl Nucleotide
  modified_base 17: mod_base = OTHER; note = 2prime-O-methyl Nucleotide
  modified_base 18: mod_base = OTHER; note = 2prime-O-methyl Nucleotide
  modified_base 19: mod_base = OTHER; note = 2prime-O-methyl Nucleotide
  modified_base 19..20: mod_base = OTHER; note = Phosphorothioate Linkage
  modified_base 20: mod_base = OTHER; note = 2prime-O-methyl Nucleotide
  modified_base 20..21: mod_base = OTHER; note = Phosphorothioate Linkage
  modified_base 21: mod_base = OTHER; note = 2prime-O-methyl Nucleotide
ggctgcgttgctggtcacata

SEQ ID NO: 28 - RNA, 21 nt, synthetic construct
  source 1..21: mol_type = other RNA
  modified_base 1: mod_base = OTHER; note = 2prime-O-methyl Nucleotide
  modified_base 1..2: mod_base = OTHER; note = Phosphorothioate Linkage
  modified_base 2: mod_base = OTHER; note = 2prime-O-methyl Nucleotide
  modified_base 2..3: mod_base = OTHER; note = Phosphorothioate Linkage
  modified_base 3: mod_base = OTHER; note = 2prime-O-methyl Nucleotide
  modified_base 4: mod_base = OTHER; note = 2prime-O-methyl Nucleotide
  modified_base 5: mod_base = OTHER; note = 2prime-O-methyl Nucleotide
  modified_base 6: mod_base = OTHER; note = 2prime-O-methyl Nucleotide
  modified_base 7: mod_base = OTHER; note = 2prime Fluoro Nucleotide
  modified_base 8: mod_base = OTHER; note = 2prime-O-methyl Nucleotide
  modified_base 9: mod_base = OTHER; note = 2prime Fluoro Nucleotide
  modified_base 10: mod_base = OTHER; note = 2prime Fluoro Nucleotide
  modified_base 11: mod_base = OTHER; note = 2prime Fluoro Nucleotide
  modified_base 12: mod_base = OTHER; note = 2prime-O-methyl Nucleotide
  modified_base 13: mod_base = OTHER; note = 2prime-O-methyl Nucleotide
  modified_base 14: mod_base = OTHER; note = 2prime-O-methyl Nucleotide
  modified_base 15: mod_base = OTHER; note = 2prime-O-methyl Nucleotide
  modified_base 16: mod_base = OTHER; note = 2prime-O-methyl Nucleotide
  modified_base 17: mod_base = OTHER; note = 2prime-O-methyl Nucleotide
  modified_base 18: mod_base = OTHER; note = 2prime-O-methyl Nucleotide
  modified_base 19: mod_base = OTHER; note = 2prime-O-methyl Nucleotide
  modified_base 19..20: mod_base = OTHER; note = Phosphorothioate Linkage
  modified_base 20: mod_base = OTHER; note = 2prime-O-methyl Nucleotide
  modified_base 20..21: mod_base = OTHER; note = Phosphorothioate Linkage
  modified_base 21: mod_base = OTHER; note = 2prime-O-methyl Nucleotide
ggctgcgttgctggtcacata

SEQ ID NO: 29 - RNA, 21 nt, synthetic construct
  source 1..21: mol_type = other RNA
  modified_base 1: mod_base = OTHER; note = 2prime-O-methyl Nucleotide
  modified_base 1..2: mod_base = OTHER; note = Phosphorothioate Linkage
  modified_base 2: mod_base = OTHER; note = 2prime-O-methyl Nucleotide
  modified_base 2..3: mod_base = OTHER; note = Phosphorothioate Linkage
  modified_base 3: mod_base = OTHER; note = 2prime-O-methyl Nucleotide
  modified_base 4: mod_base = OTHER; note = 2prime-O-methyl Nucleotide
  modified_base 5: mod_base = OTHER; note = 2prime-O-methyl Nucleotide
  modified_base 6: mod_base = OTHER; note = 2prime-O-methyl Nucleotide
  modified_base 7: mod_base = OTHER; note = 2prime Fluoro Nucleotide
  modified_base 8: mod_base = OTHER; note = 2prime-O-methyl Nucleotide
  modified_base 9: mod_base = OTHER; note = 2prime Fluoro Nucleotide
  modified_base 10: mod_base = OTHER; note = 2prime Fluoro Nucleotide
  modified_base 11: mod_base = OTHER; note = 2prime Fluoro Nucleotide
  modified_base 12: mod_base = OTHER; note = 2prime-O-methyl Nucleotide
  modified_base 13: mod_base = OTHER; note = 2prime-O-methyl Nucleotide
  modified_base 14: mod_base = OTHER; note = 2prime-O-methyl Nucleotide
  modified_base 15: mod_base = OTHER; note = 2prime-O-methyl Nucleotide
  modified_base 16: mod_base = OTHER; note = 2prime-O-methyl Nucleotide
  modified_base 17: mod_base = OTHER; note = 2prime-O-methyl Nucleotide
  modified_base 18: mod_base = OTHER; note = 2prime-O-methyl Nucleotide
  modified_base 19: mod_base = OTHER; note = 2prime-O-methyl Nucleotide
  modified_base 19..20: mod_base = OTHER; note = Phosphorothioate Linkage
  modified_base 20: mod_base = OTHER; note = 2prime-O-methyl Nucleotide
  modified_base 20..21: mod_base = OTHER; note = Phosphorothioate Linkage
  modified_base 21: mod_base = OTHER; note = 2prime-O-methyl Nucleotide
ggcctacaaatcggaactgga

SEQ ID NO: 30 - RNA, 21 nt, synthetic construct
  source 1..21: mol_type = other RNA
  modified_base 1: mod_base = OTHER; note = 2prime-O-methyl Nucleotide
  modified_base 1..2: mod_base = OTHER; note = Phosphorothioate Linkage
  modified_base 2: mod_base = OTHER; note = 2prime-O-methyl Nucleotide
  modified_base 2..3: mod_base = OTHER; note = Phosphorothioate Linkage
  modified_base 3: mod_base = OTHER; note = 2prime-O-methyl Nucleotide
  modified_base 4: mod_base = OTHER; note = 2prime-O-methyl Nucleotide
  modified_base 5: mod_base = OTHER; note = 2prime-O-methyl Nucleotide
  modified_base 6: mod_base = OTHER; note = 2prime-O-methyl Nucleotide
  modified_base 7: mod_base = OTHER; note = 2prime Fluoro Nucleotide
  modified_base 8: mod_base = OTHER; note = 2prime-O-methyl Nucleotide
  modified_base 9: mod_base = OTHER; note = 2prime Fluoro Nucleotide
  modified_base 10: mod_base = OTHER; note = 2prime Fluoro Nucleotide
  modified_base 11: mod_base = OTHER; note = 2prime Fluoro Nucleotide
  modified_base 12: mod_base = OTHER; note = 2prime-O-methyl Nucleotide
  modified_base 13: mod_base = OTHER; note = 2prime-O-methyl Nucleotide
  modified_base 14: mod_base = OTHER; note = 2prime-O-methyl Nucleotide
  modified_base 15: mod_base = OTHER; note = 2prime-O-methyl Nucleotide
  modified_base 16: mod_base = OTHER; note = 2prime-O-methyl Nucleotide
  modified_base 17: mod_base = OTHER; note = 2prime-O-methyl Nucleotide
  modified_base 18: mod_base = OTHER; note = 2prime-O-methyl Nucleotide
  modified_base 19: mod_base = OTHER; note = 2prime-O-methyl Nucleotide
  modified_base 19..20: mod_base = OTHER; note = Phosphorothioate Linkage
  modified_base 20: mod_base = OTHER; note = 2prime-O-methyl Nucleotide
  modified_base 20..21: mod_base = OTHER; note = Phosphorothioate Linkage
  modified_base 21: mod_base = OTHER; note = 2prime-O-methyl Nucleotide
ggcctacaaatcggaactgga

SEQ ID NO: 31 - RNA, 21 nt, synthetic construct
  source 1..21: mol_type = other RNA
  modified_base 1: mod_base = OTHER; note = 2prime-O-methyl Nucleotide
  modified_base 1..2: mod_base = OTHER; note = Phosphorothioate Linkage
  modified_base 2: mod_base = OTHER; note = 2prime-O-methyl Nucleotide
  modified_base 2..3: mod_base = OTHER; note = Phosphorothioate Linkage
  modified_base 3: mod_base = OTHER; note = 2prime-O-methyl Nucleotide
  modified_base 4: mod_base = OTHER; note = 2prime-O-methyl Nucleotide
  modified_base 5: mod_base = OTHER; note = 2prime-O-methyl Nucleotide
  modified_base 6: mod_base = OTHER; note = 2prime-O-methyl Nucleotide
  modified_base 7: mod_base = OTHER; note = 2prime Fluoro Nucleotide
  modified_base 8: mod_base = OTHER; note = 2prime-O-methyl Nucleotide
  modified_base 9: mod_base = OTHER; note = 2prime Fluoro Nucleotide
  modified_base 10: mod_base = OTHER; note = 2prime Fluoro Nucleotide
  modified_base 11: mod_base = OTHER; note = 2prime Fluoro Nucleotide
  modified_base 12: mod_base = OTHER; note = 2prime-O-methyl Nucleotide
  modified_base 13: mod_base = OTHER; note = 2prime-O-methyl Nucleotide
  modified_base 14: mod_base = OTHER; note = 2prime-O-methyl Nucleotide
  modified_base 15: mod_base = OTHER; note = 2prime-O-methyl Nucleotide
  modified_base 16: mod_base = OTHER; note = 2prime-O-methyl Nucleotide
  modified_base 17: mod_base = OTHER; note = 2prime-O-methyl Nucleotide
  modified_base 18: mod_base = OTHER; note = 2prime-O-methyl Nucleotide
  modified_base 19: mod_base = OTHER; note = 2prime-O-methyl Nucleotide
  modified_base 19..20: mod_base = OTHER; note = Phosphorothioate Linkage
  modified_base 20: mod_base = OTHER; note = 2prime-O-methyl Nucleotide
  modified_base 20..21: mod_base = OTHER; note = Phosphorothioate Linkage
  modified_base 21: mod_base = OTHER; note = 2prime-O-methyl Nucleotide
ggcctacaaatcggaactgga

SEQ ID NO: 32 - RNA, 21 nt, synthetic construct
  source 1..21: mol_type = other RNA
  modified_base 1: mod_base = OTHER; note = 2prime-O-methyl Nucleotide
  modified_base 1..2: mod_base = OTHER; note = Phosphorothioate Linkage
  modified_base 2: mod_base = OTHER; note = 2prime-O-methyl Nucleotide
  modified_base 2..3: mod_base = OTHER; note = Phosphorothioate Linkage
  modified_base 3: mod_base = OTHER; note = 2prime-O-methyl Nucleotide
  modified_base 4: mod_base = OTHER; note = 2prime-O-methyl Nucleotide
  modified_base 5: mod_base = OTHER; note = 2prime-O-methyl Nucleotide
  modified_base 6: mod_base = OTHER; note = 2prime-O-methyl Nucleotide
  modified_base 7: mod_base = OTHER; note = 2prime Fluoro Nucleotide
  modified_base 8: mod_base = OTHER; note = 2prime-O-methyl Nucleotide
  modified_base 9: mod_base = OTHER; note = 2prime Fluoro Nucleotide
  modified_base 10: mod_base = OTHER; note = 2prime Fluoro Nucleotide
  modified_base 11: mod_base = OTHER; note = 2prime Fluoro Nucleotide
  modified_base 12: mod_base = OTHER; note = 2prime-O-methyl Nucleotide
  modified_base 13: mod_base = OTHER; note = 2prime-O-methyl Nucleotide
  modified_base 14: mod_base = OTHER; note = 2prime-O-methyl Nucleotide
  modified_base 15: mod_base = OTHER; note = 2prime-O-methyl Nucleotide
  modified_base 16: mod_base = OTHER; note = 2prime-O-methyl Nucleotide
  modified_base 17: mod_base = OTHER; note = 2prime-O-methyl Nucleotide
  modified_base 18: mod_base = OTHER; note = 2prime-O-methyl Nucleotide
  modified_base 19: mod_base = OTHER; note = 2prime-O-methyl Nucleotide
  modified_base 19..20: mod_base = OTHER; note = Phosphorothioate Linkage
  modified_base 20: mod_base = OTHER; note = 2prime-O-methyl Nucleotide
  modified_base 20..21: mod_base = OTHER; note = Phosphorothioate Linkage
  modified_base 21: mod_base = OTHER; note = 2prime-O-methyl Nucleotide
ggcctacaaatcggaactgga

SEQ ID NO: 33 - RNA, 21 nt, synthetic construct
  source 1..21: mol_type = other RNA
  modified_base 1: mod_base = OTHER; note = 2prime-O-methyl Nucleotide
  modified_base 1..2: mod_base = OTHER; note = Phosphorothioate Linkage
  modified_base 2: mod_base = OTHER; note = 2prime-O-methyl Nucleotide
  modified_base 2..3: mod_base = OTHER; note = Phosphorothioate Linkage
  modified_base 3: mod_base = OTHER; note = 2prime-O-methyl Nucleotide
  modified_base 4: mod_base = OTHER; note = 2prime-O-methyl Nucleotide
  modified_base 5: mod_base = OTHER; note = 2prime-O-methyl Nucleotide
  modified_base 6: mod_base = OTHER; note = 2prime-O-methyl Nucleotide
  modified_base 7: mod_base = OTHER; note = 2prime Fluoro Nucleotide
  modified_base 8: mod_base = OTHER; note = 2prime-O-methyl Nucleotide
  modified_base 9: mod_base = OTHER; note = 2prime Fluoro Nucleotide
  modified_base 10: mod_base = OTHER; note = 2prime Fluoro Nucleotide
  modified_base 11: mod_base = OTHER; note = 2prime Fluoro Nucleotide
  modified_base 12: mod_base = OTHER; note = 2prime-O-methyl Nucleotide
  modified_base 13: mod_base = OTHER; note = 2prime-O-methyl Nucleotide
  modified_base 14: mod_base = OTHER; note = 2prime-O-methyl Nucleotide
  modified_base 15: mod_base = OTHER; note = 2prime-O-methyl Nucleotide
  modified_base 16: mod_base = OTHER; note = 2prime-O-methyl Nucleotide
  modified_base 17: mod_base = OTHER; note = 2prime-O-methyl Nucleotide
  modified_base 18: mod_base = OTHER; note = 2prime-O-methyl Nucleotide
  modified_base 19: mod_base = OTHER; note = 2prime-O-methyl Nucleotide
  modified_base 19..20: mod_base = OTHER; note = Phosphorothioate Linkage
  modified_base 20: mod_base = OTHER; note = 2prime-O-methyl Nucleotide
  modified_base 20..21: mod_base = OTHER; note = Phosphorothioate Linkage
  modified_base 21: mod_base = OTHER; note = 2prime-O-methyl Nucleotide
ggcctacaaatcggaactgga

SEQ ID NO: 34 - RNA, 21 nt, synthetic construct
  source 1..21: mol_type = other RNA
  modified_base 1: mod_base = OTHER; note = 2prime-O-methyl Nucleotide
  modified_base 1..2: mod_base = OTHER; note = Phosphorothioate Linkage
  modified_base 2: mod_base = OTHER; note = 2prime-O-methyl Nucleotide
  modified_base 2..3: mod_base = OTHER; note = Phosphorothioate Linkage
  modified_base 3: mod_base = OTHER; note = 2prime-O-methyl Nucleotide
  modified_base 4: mod_base = OTHER; note = 2prime-O-methyl Nucleotide
  modified_base 5: mod_base = OTHER; note = 2prime-O-methyl Nucleotide
  modified_base 6: mod_base = OTHER; note = 2prime-O-methyl Nucleotide
  modified_base 7: mod_base = OTHER; note = 2prime Fluoro Nucleotide
  modified_base 8: mod_base = OTHER; note = 2prime-O-methyl Nucleotide
  modified_base 9: mod_base = OTHER; note = 2prime Fluoro Nucleotide
  modified_base 10: mod_base = OTHER; note = 2prime Fluoro Nucleotide
  modified_base 11: mod_base = OTHER; note = 2prime Fluoro Nucleotide
  modified_base 12: mod_base = OTHER; note = 2prime-O-methyl Nucleotide
  modified_base 13: mod_base = OTHER; note = 2prime-O-methyl Nucleotide
  modified_base 14: mod_base = OTHER; note = 2prime-O-methyl Nucleotide
  modified_base 15: mod_base = OTHER; note = 2prime-O-methyl Nucleotide
  modified_base 16: mod_base = OTHER; note = 2prime-O-methyl Nucleotide
  modified_base 17: mod_base = OTHER; note = 2prime-O-methyl Nucleotide
  modified_base 18: mod_base = OTHER; note = 2prime-O-methyl Nucleotide
  modified_base 19: mod_base = OTHER; note = 2prime-O-methyl Nucleotide
  modified_base 19..20: mod_base = OTHER; note = Phosphorothioate Linkage
  modified_base 20: mod_base = OTHER; note = 2prime-O-methyl Nucleotide
  modified_base 20..21: mod_base = OTHER; note = Phosphorothioate Linkage
  modified_base 21: mod_base = OTHER; note = 2prime-O-methyl Nucleotide
  modified_base 21: mod_base = OTHER; note = Phosphorylated adenine
ggcctacaaatcggaactgga

SEQ ID NO: 35 - RNA, 21 nt, synthetic construct
  source 1..21: mol_type = other RNA
  modified_base 1: mod_base = OTHER; note = 2prime-O-methyl Nucleotide
  modified_base 1..2: mod_base = OTHER; note = Phosphorothioate Linkage
  modified_base 2: mod_base = OTHER; note = 2prime-O-methyl Nucleotide
  modified_base 2..3: mod_base = OTHER; note = Phosphorothioate Linkage
  modified_base 3: mod_base = OTHER; note = 2prime-O-methyl Nucleotide
  modified_base 4: mod_base = OTHER; note = 2prime-O-methyl Nucleotide
  modified_base 5: mod_base = OTHER; note = 2prime-O-methyl Nucleotide
  modified_base 6: mod_base = OTHER; note = 2prime-O-methyl Nucleotide
  modified_base 7: mod_base = OTHER; note = 2prime-O-methyl Nucleotide
  modified_base 8: mod_base = OTHER; note = 2prime-O-methyl Nucleotide
  modified_base 9: mod_base = OTHER; note = 2prime Fluoro Nucleotide
  modified_base 10: mod_base = OTHER; note = 2prime Fluoro Nucleotide
  modified_base 11: mod_base = OTHER; note = 2prime Fluoro Nucleotide
  modified_base 12: mod_base = OTHER; note = 2prime-O-methyl Nucleotide
  modified_base 13: mod_base = OTHER; note = 2prime-O-methyl Nucleotide
  modified_base 14: mod_base = OTHER; note = 2prime-O-methyl Nucleotide
  modified_base 15: mod_base = OTHER; note = 2prime-O-methyl Nucleotide
  modified_base 16: mod_base = OTHER; note = 2prime-O-methyl Nucleotide
  modified_base 17: mod_base = OTHER; note = 2prime-O-methyl Nucleotide
  modified_base 18: mod_base = OTHER; note = 2prime-O-methyl Nucleotide
  modified_base 19: mod_base = OTHER; note = 2prime-O-methyl Nucleotide
  modified_base 19..20: mod_base = OTHER; note = Phosphorothioate Linkage
  modified_base 20: mod_base = OTHER; note = 2prime-O-methyl Nucleotide
  modified_base 20..21: mod_base = OTHER; note = Phosphorothioate Linkage
  modified_base 21: mod_base = OTHER; note = 2prime-O-methyl Nucleotide
ggcctacaaatcggaactgga

SEQ ID NO: 36 - RNA, 21 nt, synthetic construct
  source 1..21: mol_type = other RNA
  modified_base 1: mod_base = OTHER; note = 2prime-O-methyl Nucleotide
  modified_base 1..2: mod_base = OTHER; note = Phosphorothioate Linkage
  modified_base 2: mod_base = OTHER; note = 2prime-O-methyl Nucleotide
  modified_base 2..3: mod_base = OTHER; note = Phosphorothioate Linkage
  modified_base 3: mod_base = OTHER; note = 2prime-O-methyl Nucleotide
  modified_base 4: mod_base = OTHER; note = 2prime-O-methyl Nucleotide
  modified_base 5: mod_base = OTHER; note = 2prime-O-methyl Nucleotide
  modified_base 6: mod_base = OTHER; note = 2prime-O-methyl Nucleotide
  modified_base 7: mod_base = OTHER; note = 2prime Fluoro Nucleotide
  modified_base 8: mod_base = OTHER; note = 2prime-O-methyl Nucleotide
  modified_base 9: mod_base = OTHER; note = 2prime Fluoro Nucleotide
  modified_base 10: mod_base = OTHER; note = 2prime Fluoro Nucleotide
  modified_base 11: mod_base = OTHER; note = 2prime Fluoro Nucleotide
  modified_base 12: mod_base = OTHER; note = 2prime-O-methyl Nucleotide
  modified_base 13: mod_base = OTHER; note = 2prime-O-methyl Nucleotide
  modified_base 14: mod_base = OTHER; note = 2prime-O-methyl Nucleotide
  modified_base 15: mod_base = OTHER; note = 2prime-O-methyl Nucleotide
  modified_base 16: mod_base = OTHER; note = 2prime-O-methyl Nucleotide
  modified_base 17: mod_base = OTHER; note = 2prime-O-methyl Nucleotide
  modified_base 18: mod_base = OTHER; note = 2prime-O-methyl Nucleotide
  modified_base 19: mod_base = OTHER; note = 2prime-O-methyl Nucleotide
  modified_base 19..20: mod_base = OTHER; note = Phosphorothioate Linkage
  modified_base 20: mod_base = OTHER; note = 2prime-O-methyl Nucleotide
  modified_base 20..21: mod_base = OTHER; note = Phosphorothioate Linkage
  modified_base 21: mod_base = OTHER; note = 2prime-O-methyl Nucleotide
atggacgagaccatgaaggaa

SEQ ID NO: 37 - RNA, 21 nt, synthetic construct
  source 1..21: mol_type = other RNA
  modified_base 1: mod_base = OTHER; note = 2prime-O-methyl Nucleotide
  modified_base 1..2: mod_base = OTHER; note = Phosphorothioate Linkage
  modified_base 2: mod_base = OTHER; note = 2prime-O-methyl Nucleotide
  modified_base 2..3: mod_base = OTHER; note = Phosphorothioate Linkage
  modified_base 3: mod_base = OTHER; note = 2prime-O-methyl Nucleotide
  modified_base 4: mod_base = OTHER; note = 2prime-O-methyl Nucleotide
  modified_base 5: mod_base = OTHER; note = 2prime-O-methyl Nucleotide
  modified_base 6: mod_base = OTHER; note = 2prime-O-methyl Nucleotide
  modified_base 7: mod_base = OTHER; note = 2prime Fluoro Nucleotide
  modified_base 8: mod_base = OTHER; note = 2prime-O-methyl Nucleotide
  modified_base 9: mod_base = OTHER; note = 2prime Fluoro Nucleotide
  modified_base 10: mod_base = OTHER; note = 2prime Fluoro Nucleotide
  modified_base 11: mod_base = OTHER; note = 2prime Fluoro Nucleotide
  modified_base 12: mod_base = OTHER; note = 2prime-O-methyl Nucleotide
  modified_base 13: mod_base = OTHER; note = 2prime-O-methyl Nucleotide
  modified_base 14: mod_base = OTHER; note = 2prime-O-methyl Nucleotide
  modified_base 15: mod_base = OTHER; note = 2prime-O-methyl Nucleotide
  modified_base 16: mod_base = OTHER; note = 2prime-O-methyl Nucleotide
  modified_base 17: mod_base = OTHER; note = 2prime-O-methyl Nucleotide
  modified_base 18: mod_base = OTHER; note = 2prime-O-methyl Nucleotide
  modified_base 19: mod_base = OTHER; note = 2prime-O-methyl Nucleotide
  modified_base 19..20: mod_base = OTHER; note = Phosphorothioate Linkage
  modified_base 20: mod_base = OTHER; note = 2prime-O-methyl Nucleotide
  modified_base 20..21: mod_base = OTHER; note = Phosphorothioate Linkage
  modified_base 21: mod_base = OTHER; note = 2prime-O-methyl Nucleotide
atggacgagaccatgaaggaa

SEQ ID NO: 38 - RNA, 21 nt, synthetic construct
  source 1..21: mol_type = other RNA
  modified_base 1: mod_base = OTHER; note = 2prime-O-methyl Nucleotide
  modified_base 1..2: mod_base = OTHER; note = Phosphorothioate Linkage
  modified_base 2: mod_base = OTHER; note = 2prime-O-methyl Nucleotide
  modified_base 2..3: mod_base = OTHER; note = Phosphorothioate Linkage
  modified_base 3: mod_base = OTHER; note = 2prime-O-methyl Nucleotide
  modified_base 4: mod_base = OTHER; note = 2prime-O-methyl Nucleotide
  modified_base 5: mod_base = OTHER; note = 2prime-O-methyl Nucleotide
  modified_base 6: mod_base = OTHER; note = 2prime-O-methyl Nucleotide
  modified_base 7: mod_base = OTHER; note = 2prime Fluoro Nucleotide
  modified_base 8: mod_base = OTHER; note = 2prime-O-methyl Nucleotide
  modified_base 9: mod_base = OTHER; note = 2prime Fluoro Nucleotide
  modified_base 10: mod_base = OTHER; note = 2prime Fluoro Nucleotide
  modified_base 11: mod_base = OTHER; note = 2prime Fluoro Nucleotide
  modified_base 12: mod_base = OTHER; note = 2prime-O-methyl Nucleotide
  modified_base 13: mod_base = OTHER; note = 2prime-O-methyl Nucleotide
  modified_base 14: mod_base = OTHER; note = 2prime-O-methyl Nucleotide
  modified_base 15: mod_base = OTHER; note = 2prime-O-methyl Nucleotide
  modified_base 16: mod_base = OTHER; note = 2prime-O-methyl Nucleotide
  modified_base 17: mod_base = OTHER; note = 2prime-O-methyl Nucleotide
  modified_base 18: mod_base = OTHER; note = 2prime-O-methyl Nucleotide
  modified_base 19: mod_base = OTHER; note = 2prime-O-methyl Nucleotide
  modified_base 19..20: mod_base = OTHER; note = Phosphorothioate Linkage
  modified_base 20: mod_base = OTHER; note = 2prime-O-methyl Nucleotide
  modified_base 20..21: mod_base = OTHER; note = Phosphorothioate Linkage
  modified_base 21: mod_base = OTHER; note = 2prime-O-methyl Nucleotide
atggacgagaccatgaaggaa

SEQ ID NO: 39 - RNA, 21 nt, synthetic construct
  source 1..21: mol_type = other RNA
  modified_base 1: mod_base = OTHER; note = 2prime-O-methyl Nucleotide
  modified_base 1..2: mod_base = OTHER; note = Phosphorothioate Linkage
  modified_base 2: mod_base = OTHER; note = 2prime-O-methyl Nucleotide
  modified_base 2..3: mod_base = OTHER; note = Phosphorothioate Linkage
  modified_base 3: mod_base = OTHER; note = 2prime-O-methyl Nucleotide
  modified_base 4: mod_base = OTHER; note = 2prime-O-methyl Nucleotide
  modified_base 5: mod_base = OTHER; note = 2prime-O-methyl Nucleotide
  modified_base 6: mod_base = OTHER; note = 2prime-O-methyl Nucleotide
  modified_base 7: mod_base = OTHER; note = 2prime Fluoro Nucleotide
  modified_base 8: mod_base = OTHER; note = 2prime-O-methyl Nucleotide
  modified_base 9: mod_base = OTHER; note = 2prime Fluoro Nucleotide
  modified_base 10: mod_base = OTHER; note = 2prime Fluoro Nucleotide
  modified_base 11: mod_base = OTHER; note = 2prime Fluoro Nucleotide
  modified_base 12: mod_base = OTHER; note = 2prime-O-methyl Nucleotide
  modified_base 13: mod_base = OTHER; note = 2prime-O-methyl Nucleotide
  modified_base 14: mod_base = OTHER; note = 2prime-O-methyl Nucleotide
  modified_base 15: mod_base = OTHER; note = 2prime-O-methyl Nucleotide
  modified_base 16: mod_base = OTHER; note = 2prime-O-methyl Nucleotide
  modified_base 17: mod_base = OTHER; note = 2prime-O-methyl Nucleotide
  modified_base 18: mod_base = OTHER; note = 2prime-O-methyl Nucleotide
  modified_base 19: mod_base = OTHER; note = 2prime-O-methyl Nucleotide
  modified_base 19..20: mod_base = OTHER; note = Phosphorothioate Linkage
  modified_base 20: mod_base = OTHER; note = 2prime-O-methyl Nucleotide
  modified_base 20..21: mod_base = OTHER; note = Phosphorothioate Linkage
  modified_base 21: mod_base = OTHER; note = 2prime-O-methyl Nucleotide
atggacgagaccatgaaggaa

SEQ ID NO: 40 - RNA, 21 nt, synthetic construct
  source 1..21: mol_type = other RNA
  modified_base 1: mod_base = OTHER; note = 2prime-O-methyl Nucleotide
  modified_base 1..2: mod_base = OTHER; note = Phosphorothioate Linkage
  modified_base 2: mod_base = OTHER; note = 2prime-O-methyl Nucleotide
  modified_base 2..3: mod_base = OTHER; note = Phosphorothioate Linkage
  modified_base 3: mod_base = OTHER; note = 2prime-O-methyl Nucleotide
  modified_base 4: mod_base = OTHER; note = 2prime-O-methyl Nucleotide
  modified_base 5: mod_base = OTHER; note = 2prime-O-methyl Nucleotide
  modified_base 6: mod_base = OTHER; note = 2prime-O-methyl Nucleotide
  modified_base 7: mod_base = OTHER; note = 2prime Fluoro Nucleotide
  modified_base 8: mod_base = OTHER; note = 2prime-O-methyl Nucleotide
  modified_base 9: mod_base = OTHER; note = 2prime Fluoro Nucleotide
  modified_base 10: mod_base = OTHER; note = 2prime Fluoro Nucleotide
  modified_base 11: mod_base = OTHER; note = 2prime Fluoro Nucleotide
  modified_base 12: mod_base = OTHER; note = 2prime-O-methyl Nucleotide
  modified_base 13: mod_base = OTHER; note = 2prime-O-methyl Nucleotide
  modified_base 14: mod_base = OTHER; note = 2prime-O-methyl Nucleotide
  modified_base 15: mod_base = OTHER; note = 2prime-O-methyl Nucleotide
  modified_base 16: mod_base = OTHER; note = 2prime-O-methyl Nucleotide
  modified_base 17: mod_base = OTHER; note = 2prime-O-methyl Nucleotide
  modified_base 18: mod_base = OTHER; note = 2prime-O-methyl Nucleotide
  modified_base 19: mod_base = OTHER; note = 2prime-O-methyl Nucleotide
  modified_base 19..20: mod_base = OTHER; note = Phosphorothioate Linkage
  modified_base 20: mod_base = OTHER; note = 2prime-O-methyl Nucleotide
  modified_base 20..21: mod_base = OTHER; note = Phosphorothioate Linkage
  modified_base 21: mod_base = OTHER; note = 2prime-O-methyl Nucleotide
atggacgagaccatgaaggaa

SEQ ID NO: 41 - RNA, 21 nt, synthetic construct
  source 1..21: mol_type = other RNA
  modified_base 1: mod_base = OTHER; note = 2prime-O-methyl Nucleotide
  modified_base 1..2: mod_base = OTHER; note = Phosphorothioate Linkage
  modified_base 2: mod_base = OTHER; note = 2prime-O-methyl Nucleotide
  modified_base 2..3: mod_base = OTHER; note = Phosphorothioate Linkage
  modified_base 3: mod_base = OTHER; note = 2prime-O-methyl Nucleotide
  modified_base 4: mod_base = OTHER; note = 2prime-O-methyl Nucleotide
  modified_base 5: mod_base = OTHER; note = 2prime-O-methyl Nucleotide
  modified_base 6: mod_base = OTHER; note = 2prime-O-methyl Nucleotide
  modified_base 7: mod_base = OTHER; note = 2prime Fluoro Nucleotide
  modified_base 8: mod_base = OTHER; note = 2prime-O-methyl Nucleotide
  modified_base 9: mod_base = OTHER; note = 2prime Fluoro Nucleotide
  modified_base 10: mod_base = OTHER; note = 2prime Fluoro Nucleotide
  modified_base 11: mod_base = OTHER; note = 2prime Fluoro Nucleotide
  modified_base 12: mod_base = OTHER; note = 2prime-O-methyl Nucleotide
  modified_base 13: mod_base = OTHER; note = 2prime-O-methyl Nucleotide
  modified_base 14: mod_base = OTHER; note = 2prime-O-methyl Nucleotide
  modified_base 15: mod_base = OTHER; note = 2prime-O-methyl Nucleotide
  modified_base 16: mod_base = OTHER; note = 2prime-O-methyl Nucleotide
  modified_base 17: mod_base = OTHER; note = 2prime-O-methyl Nucleotide
  modified_base 18: mod_base = OTHER; note = 2prime-O-methyl Nucleotide
  modified_base 19: mod_base = OTHER; note = 2prime-O-methyl Nucleotide
  modified_base 19..20: mod_base = OTHER; note = Phosphorothioate Linkage
  modified_base 20: mod_base = OTHER; note = 2prime-O-methyl Nucleotide
  modified_base 20..21: mod_base = OTHER; note = Phosphorothioate Linkage
  modified_base 21: mod_base = OTHER; note = 2prime-O-methyl Nucleotide
atggacgagaccatgaaggaa

SEQ ID NO: 42 - RNA, 21 nt, synthetic construct
  source 1..21: mol_type = other RNA
  modified_base 1: mod_base = OTHER; note = 2prime-O-methyl Nucleotide
  modified_base 1..2: mod_base = OTHER; note = Phosphorothioate Linkage
  modified_base 2: mod_base = OTHER; note = 2prime-O-methyl Nucleotide
  modified_base 2..3: mod_base = OTHER; note = Phosphorothioate Linkage
  modified_base 3: mod_base = OTHER; note = 2prime-O-methyl Nucleotide
  modified_base 4: mod_base = OTHER; note = 2prime-O-methyl Nucleotide
  modified_base 5: mod_base = OTHER; note = 2prime-O-methyl Nucleotide
  modified_base 6: mod_base = OTHER; note = 2prime-O-methyl Nucleotide
  modified_base 7: mod_base = OTHER; note = 2prime-O-methyl Nucleotide
  modified_base 8: mod_base = OTHER; note = 2prime-O-methyl Nucleotide
  modified_base 9: mod_base = OTHER; note = 2prime Fluoro Nucleotide
  modified_base 10: mod_base = OTHER; note = 2prime Fluoro Nucleotide
  modified_base 11: mod_base = OTHER; note = 2prime Fluoro Nucleotide
  modified_base 12: mod_base = OTHER; note = 2prime-O-methyl Nucleotide
  modified_base 13: mod_base = OTHER; note = 2prime-O-methyl Nucleotide
  modified_base 14: mod_base = OTHER; note = 2prime-O-methyl Nucleotide
  modified_base 15: mod_base = OTHER; note = 2prime-O-methyl Nucleotide
  modified_base 16: mod_base = OTHER; note = 2prime-O-methyl Nucleotide
  modified_base 17: mod_base = OTHER; note = 2prime-O-methyl Nucleotide
  modified_base 18: mod_base = OTHER; note = 2prime-O-methyl Nucleotide
  modified_base 19: mod_base = OTHER; note = 2prime-O-methyl Nucleotide
  modified_base 19..20: mod_base = OTHER; note = Phosphorothioate Linkage
  modified_base 20: mod_base = OTHER; note = 2prime-O-methyl Nucleotide
  modified_base 20..21: mod_base = OTHER; note = Phosphorothioate Linkage
  modified_base 21: mod_base = OTHER; note = 2prime-O-methyl Nucleotide
atggacgagaccatgaaggaa

SEQ ID NO: 43 - RNA, 23 nt, synthetic construct
  source 1..23: mol_type = other RNA
  modified_base 1: mod_base = OTHER; note = 2prime-O-methyl Nucleotide
  modified_base 1..2: mod_base = OTHER; note = Phosphorothioate Linkage
  modified_base 2: mod_base = OTHER; note = 2prime Fluoro Nucleotide
  modified_base 2..3: mod_base = OTHER; note = Phosphorothioate Linkage
  modified_base 3: mod_base = OTHER; note = 2prime-O-methyl Nucleotide
  modified_base 4: mod_base = OTHER; note = 2prime-O-methyl Nucleotide
  modified_base 5: mod_base = OTHER; note = 2prime-O-methyl Nucleotide
  modified_base 6: mod_base = OTHER; note = 2prime Fluoro Nucleotide
  modified_base 7: mod_base = OTHER; note = 2prime-O-methyl Nucleotide
  modified_base 8: mod_base = OTHER; note = 2prime-O-methyl Nucleotide
  modified_base 9: mod_base = OTHER; note = 2prime-O-methyl Nucleotide
  modified_base 10: mod_base = OTHER; note = 2prime-O-methyl Nucleotide
  modified_base 11: mod_base = OTHER; note = 2prime-O-methyl Nucleotide
  modified_base 12: mod_base = OTHER; note = 2prime-O-methyl Nucleotide
  modified_base 13: mod_base = OTHER; note = 2prime-O-methyl Nucleotide
  modified_base 14: mod_base = OTHER; note = 2prime Fluoro Nucleotide
  modified_base 15: mod_base = OTHER; note = 2prime-O-methyl Nucleotide
  modified_base 16: mod_base = OTHER; note = 2prime Fluoro Nucleotide
  modified_base 17: mod_base = OTHER; note = 2prime-O-methyl Nucleotide
  modified_base 18: mod_base = OTHER; note = 2prime-O-methyl Nucleotide
  modified_base 19: mod_base = OTHER; note = 2prime-O-methyl Nucleotide
  modified_base 20: mod_base = OTHER; note = 2prime-O-methyl Nucleotide
  modified_base 21: mod_base = OTHER; note = 2prime-O-methyl Nucleotide
  modified_base 21..22: mod_base = OTHER; note = Phosphorothioate Linkage
  modified_base 22: mod_base = OTHER; note = 2prime-O-methyl Nucleotide
  modified_base 22..23: mod_base = OTHER; note = Phosphorothioate Linkage
  modified_base 23: mod_base = OTHER; note = 2prime-O-methyl Nucleotide
tcaacgcagcccacagaaccttc

SEQ ID NO: 44 - RNA, 23 nt, synthetic construct
  source 1..23: mol_type = other RNA
  modified_base 1: mod_base = OTHER; note = 2prime-O-methyl Nucleotide
  modified_base 1..2: mod_base = OTHER; note = Phosphorothioate Linkage
  modified_base 2: mod_base = OTHER; note = 2prime Fluoro Nucleotide
  modified_base 2..3: mod_base = OTHER; note = Phosphorothioate Linkage
  modified_base 3: mod_base = OTHER; note = 2prime-O-methyl Nucleotide
  modified_base 4: mod_base = OTHER; note = 2prime-O-methyl Nucleotide
  modified_base 5: mod_base = OTHER; note = 2prime Fluoro Nucleotide
  modified_base 6: mod_base = OTHER; note = 2prime-O-methyl Nucleotide
  modified_base 7: mod_base = OTHER; note = 2prime-O-methyl Nucleotide
  modified_base 8: mod_base = OTHER; note = 2prime-O-methyl Nucleotide
  modified_base 9: mod_base = OTHER; note = 2prime-O-methyl Nucleotide
  modified_base 10: mod_base = OTHER; note = 2prime-O-methyl Nucleotide
  modified_base 11: mod_base = OTHER; note = 2prime-O-methyl Nucleotide
  modified_base 12: mod_base = OTHER; note = 2prime-O-methyl Nucleotide
  modified_base 13: mod_base = OTHER; note = 2prime-O-methyl Nucleotide
  modified_base 14: mod_base = OTHER; note = 2prime Fluoro Nucleotide
  modified_base 15: mod_base = OTHER; note = 2prime-O-methyl Nucleotide
  modified_base 16: mod_base = OTHER; note = 2prime Fluoro Nucleotide
  modified_base 17: mod_base = OTHER; note = 2prime-O-methyl Nucleotide
  modified_base 18: mod_base = OTHER; note = 2prime-O-methyl Nucleotide
  modified_base 19: mod_base = OTHER; note = 2prime-O-methyl Nucleotide
  modified_base 20: mod_base = OTHER; note = 2prime-O-methyl Nucleotide
  modified_base 21: mod_base = OTHER; note = 2prime-O-methyl Nucleotide
  modified_base 21..22: mod_base = OTHER; note = Phosphorothioate Linkage
  modified_base 22: mod_base = OTHER; note = 2prime-O-methyl Nucleotide
  modified_base 22..23: mod_base = OTHER; note = Phosphorothioate Linkage
  modified_base 23: mod_base = OTHER; note = 2prime-O-methyl Nucleotide
tcaacgcagcccacagaaccttc

SEQ ID NO: 45 - RNA, 23 nt, synthetic construct
  source 1..23: mol_type = other RNA
  modified_base 1: mod_base = OTHER; note = 2prime-O-methyl Nucleotide
  modified_base 1..2: mod_base = OTHER; note = Phosphorothioate Linkage
  modified_base 2: mod_base = OTHER; note = 2prime Fluoro Nucleotide
  modified_base 2..3: mod_base = OTHER; note = Phosphorothioate Linkage
  modified_base 3: mod_base = OTHER; note = 2prime-O-methyl Nucleotide
  modified_base 4: mod_base = OTHER; note = 2prime Fluoro Nucleotide
  modified_base 5: mod_base = OTHER; note = 2prime-O-methyl Nucleotide
  modified_base 6: mod_base = OTHER; note = 2prime-O-methyl Nucleotide
  modified_base 7: mod_base = OTHER; note = 2prime-O-methyl Nucleotide
  modified_base 8: mod_base = OTHER; note = 2prime-O-methyl Nucleotide
  modified_base 9: mod_base = OTHER; note = 2prime-O-methyl Nucleotide
  modified_base 10: mod_base = OTHER; note = 2prime-O-methyl Nucleotide
  modified_base 11: mod_base = OTHER; note = 2prime-O-methyl Nucleotide
  modified_base 12: mod_base = OTHER; note = 2prime-O-methyl Nucleotide
  modified_base 13: mod_base = OTHER; note = 2prime-O-methyl Nucleotide
  modified_base 14: mod_base = OTHER; note = 2prime Fluoro Nucleotide
  modified_base 15: mod_base = OTHER; note = 2prime-O-methyl Nucleotide
  modified_base 16: mod_base = OTHER; note = 2prime Fluoro Nucleotide
  modified_base 17: mod_base = OTHER; note = 2prime-O-methyl Nucleotide
  modified_base 18: mod_base = OTHER; note = 2prime-O-methyl Nucleotide
  modified_base 19: mod_base = OTHER; note = 2prime-O-methyl Nucleotide
  modified_base 20: mod_base = OTHER; note = 2prime-O-methyl Nucleotide
  modified_base 21: mod_base = OTHER; note = 2prime-O-methyl Nucleotide
  modified_base 21..22: mod_base = OTHER; note = Phosphorothioate Linkage
  modified_base 22: mod_base = OTHER; note = 2prime-O-methyl Nucleotide
  modified_base 22..23: mod_base = OTHER; note = Phosphorothioate Linkage
  modified_base 23: mod_base = OTHER; note = 2prime-O-methyl Nucleotide
tcaacgcagcccacagaaccttc

SEQ ID NO: 46 - RNA, 23 nt, synthetic construct
  source 1..23: mol_type = other RNA
  modified_base 1: mod_base = OTHER; note = 2prime-O-methyl Nucleotide
  modified_base 1..2: mod_base = OTHER; note = Phosphorothioate Linkage
  modified_base 2: mod_base = OTHER; note = 2prime Fluoro Nucleotide
  modified_base 2..3: mod_base = OTHER; note = Phosphorothioate Linkage
  modified_base 3: mod_base = OTHER; note = 2prime-O-methyl Nucleotide
  modified_base 4: mod_base = OTHER; note = 2prime-O-methyl Nucleotide
  modified_base 5: mod_base = OTHER; note = 2prime-O-methyl Nucleotide
  modified_base 6: mod_base = OTHER; note = 2prime-O-methyl Nucleotide
  modified_base 7: mod_base = OTHER; note = 2prime Fluoro Nucleotide
  modified_base 8: mod_base = OTHER; note = 2prime-O-methyl Nucleotide
  modified_base 9: mod_base = OTHER; note = 2prime-O-methyl Nucleotide
  modified_base 10: mod_base = OTHER; note = 2prime-O-methyl Nucleotide
  modified_base 11: mod_base = OTHER; note = 2prime-O-methyl Nucleotide
  modified_base 12: mod_base = OTHER; note = 2prime-O-methyl Nucleotide
  modified_base 13: mod_base = OTHER; note = 2prime-O-methyl Nucleotide
  modified_base 14: mod_base = OTHER; note = 2prime Fluoro Nucleotide
  modified_base 15: mod_base = OTHER; note = 2prime-O-methyl Nucleotide
  modified_base 16: mod_base = OTHER; note = 2prime Fluoro Nucleotide
  modified_base 17: mod_base = OTHER; note = 2prime-O-methyl Nucleotide
  modified_base 18: mod_base = OTHER; note = 2prime-O-methyl Nucleotide
  modified_base 19: mod_base = OTHER; note = 2prime-O-methyl Nucleotide
  modified_base 20: mod_base = OTHER; note = 2prime-O-methyl Nucleotide
  modified_base 21: mod_base = OTHER; note = 2prime-O-methyl Nucleotide
  modified_base 21..22: mod_base = OTHER; note = Phosphorothioate Linkage
  modified_base 22: mod_base = OTHER; note = 2prime-O-methyl Nucleotide
  modified_base 22..23: mod_base = OTHER; note = Phosphorothioate Linkage
  modified_base 23: mod_base = OTHER; note = 2prime-O-methyl Nucleotide
tcaacgcagcccacagaaccttc

SEQ ID NO: 47 - RNA, 23 nt, synthetic construct
  source 1..23: mol_type = other RNA
  modified_base 1: mod_base = OTHER; note = 2prime-O-methyl Nucleotide
  modified_base 1..2: mod_base = OTHER; note = Phosphorothioate Linkage
  modified_base 2: mod_base = OTHER; note = 2prime Fluoro Nucleotide
  modified_base 2..3: mod_base = OTHER; note = Phosphorothioate Linkage
  modified_base 3: mod_base = OTHER; note = 2prime Fluoro Nucleotide
  modified_base 4: mod_base = OTHER; note = 2prime-O-methyl Nucleotide
  modified_base 5: mod_base = OTHER; note = 2prime-O-methyl Nucleotide
  modified_base 6: mod_base = OTHER; note = 2prime-O-methyl Nucleotide
  modified_base 7: mod_base = OTHER; note = 2prime Fluoro Nucleotide
  modified_base 8: mod_base = OTHER; note = 2prime-O-methyl Nucleotide
  modified_base 9: mod_base = OTHER; note = 2prime-O-methyl Nucleotide
  modified_base 10: mod_base = OTHER; note = 2prime-O-methyl Nucleotide
  modified_base 11: mod_base = OTHER; note = 2prime-O-methyl Nucleotide
  modified_base 12: mod_base = OTHER; note = 2prime-O-methyl Nucleotide
  modified_base 13: mod_base = OTHER; note = 2prime-O-methyl Nucleotide
  modified_base 14: mod_base = OTHER; note = 2prime Fluoro Nucleotide
  modified_base 15: mod_base = OTHER; note = 2prime-O-methyl Nucleotide
  modified_base 16: mod_base = OTHER; note = 2prime Fluoro Nucleotide
  modified_base 17: mod_base = OTHER; note = 2prime-O-methyl Nucleotide
  modified_base 18: mod_base = OTHER; note = 2prime-O-methyl Nucleotide
  modified_base 19: mod_base = OTHER; note = 2prime-O-methyl Nucleotide
  modified_base 20: mod_base = OTHER; note = 2prime-O-methyl Nucleotide
  modified_base 21: mod_base = OTHER; note = 2prime-O-methyl Nucleotide
  modified_base 21..22: mod_base = OTHER; note = Phosphorothioate Linkage
  modified_base 22: mod_base = OTHER; note = 2prime-O-methyl Nucleotide
  modified_base 22..23: mod_base = OTHER; note = Phosphorothioate Linkage
  modified_base 23: mod_base = OTHER; note = 2prime-O-methyl Nucleotide
tcaacgcagcccacagaaccttc

SEQ ID NO: 48 - RNA, 23 nt, synthetic construct
  source 1..23: mol_type = other RNA
  modified_base 1: mod_base = OTHER; note = 2prime-O-methyl Nucleotide
  modified_base 1..2: mod_base = OTHER; note = Phosphorothioate Linkage
  modified_base 2: mod_base = OTHER; note = 2prime Fluoro Nucleotide
  modified_base 2..3: mod_base = OTHER; note = Phosphorothioate Linkage
  modified_base 3: mod_base = OTHER; note = 2prime-O-methyl Nucleotide
  modified_base 4: mod_base = OTHER; note = 2prime-O-methyl Nucleotide
  modified_base 5: mod_base = OTHER; note = 2prime Fluoro Nucleotide
  modified_base 6: mod_base = OTHER; note = 2prime-O-methyl Nucleotide
  modified_base 7: mod_base = OTHER; note = 2prime Fluoro Nucleotide
  modified_base 8: mod_base = OTHER; note = 2prime-O-methyl Nucleotide
  modified_base 9: mod_base = OTHER; note = 2prime-O-methyl Nucleotide
  modified_base 10: mod_base = OTHER; note = 2prime-O-methyl Nucleotide
  modified_base 11: mod_base = OTHER; note = 2prime-O-methyl Nucleotide
  modified_base 12: mod_base = OTHER; note = 2prime-O-methyl Nucleotide
  modified_base 13: mod_base = OTHER; note = 2prime-O-methyl Nucleotide
  modified_base 14: mod_base = OTHER; note = 2prime Fluoro Nucleotide
  modified_base 15: mod_base = OTHER; note = 2prime-O-methyl Nucleotide
  modified_base 16: mod_base = OTHER; note = 2prime Fluoro Nucleotide
  modified_base 17: mod_base = OTHER; note = 2prime-O-methyl Nucleotide
  modified_base 18: mod_base = OTHER; note = 2prime-O-methyl Nucleotide
  modified_base 19: mod_base = OTHER; note = 2prime-O-methyl Nucleotide
  modified_base 20: mod_base = OTHER; note = 2prime-O-methyl Nucleotide
  modified_base 21: mod_base = OTHER; note = 2prime-O-methyl Nucleotide
  modified_base 21..22: mod_base = OTHER; note = Phosphorothioate Linkage
  modified_base 22: mod_base = OTHER; note = 2prime-O-methyl Nucleotide
  modified_base 22..23: mod_base = OTHER; note = Phosphorothioate Linkage
  modified_base 23: mod_base = OTHER; note = 2prime-O-methyl Nucleotide
tcaacgcagcccacagaaccttc

SEQ ID NO: 49 - RNA, 23 nt, synthetic construct
  source 1..23: mol_type = other RNA
  modified_base 1: mod_base = OTHER; note = 2prime-O-methyl Nucleotide
  modified_base 1..2: mod_base = OTHER; note = Phosphorothioate Linkage
  modified_base 2: mod_base = OTHER; note = 2prime Fluoro Nucleotide
  modified_base 2..3: mod_base = OTHER; note = Phosphorothioate Linkage
  modified_base 3: mod_base = OTHER; note = 2prime-O-methyl Nucleotide
  modified_base 4: mod_base = OTHER; note = 2prime-O-methyl Nucleotide
  modified_base 5: mod_base = OTHER; note = 2prime Fluoro Nucleotide
  modified_base 6: mod_base = OTHER; note = 2prime-O-methyl Nucleotide
  modified_base 7: mod_base = OTHER; note = 2prime Fluoro Nucleotide
  modified_base 8: mod_base = OTHER; note = 2prime-O-methyl Nucleotide
  modified_base 9: mod_base = OTHER; note = 2prime-O-methyl Nucleotide
  modified_base 10: mod_base = OTHER; note = 2prime-O-methyl Nucleotide
  modified_base 11: mod_base = OTHER; note = 2prime-O-methyl Nucleotide
  modified_base 12: mod_base = OTHER; note = 2prime-O-methyl Nucleotide
  modified_base 13: mod_base = OTHER; note = 2prime-O-methyl Nucleotide
  modified_base 14: mod_base = OTHER; note = 2prime Fluoro Nucleotide
  modified_base 15: mod_base = OTHER; note = 2prime-O-methyl Nucleotide
  modified_base 16: mod_base = OTHER; note = 2prime Fluoro Nucleotide
  modified_base 17: mod_base = OTHER; note = 2prime-O-methyl Nucleotide
  modified_base 18: mod_base = OTHER; note = 2prime-O-methyl Nucleotide
  modified_base 19: mod_base = OTHER; note = 2prime-O-methyl Nucleotide
  modified_base 20: mod_base = OTHER; note = 2prime-O-methyl Nucleotide
  modified_base 21: mod_base = OTHER; note = 2prime-O-methyl Nucleotide
  modified_base 21..22: mod_base = OTHER; note = Phosphorothioate Linkage
  modified_base 22: mod_base = OTHER; note = 2prime-O-methyl Nucleotide
  modified_base 22..23: mod_base = OTHER; note = Phosphorothioate Linkage
  modified_base 23: mod_base = OTHER; note = 2prime-O-methyl Nucleotide
tcaacgcagcccacagaaccttc

SEQ ID NO: 50 - RNA, 23 nt, synthetic construct
  source 1..23: mol_type = other RNA
  modified_base 1: mod_base = OTHER; note = 2prime-O-methyl Nucleotide
  modified_base 1..2: mod_base = OTHER; note = Phosphorothioate Linkage
  modified_base 2: mod_base = OTHER; note = 2prime Fluoro Nucleotide
  modified_base 2..3: mod_base = OTHER; note = Phosphorothioate Linkage
  modified_base 3: mod_base = OTHER; note = 2prime-O-methyl Nucleotide
  modified_base 4: mod_base = OTHER; note = 2prime-O-methyl Nucleotide
  modified_base 5: mod_base = OTHER; note = 2prime-O-methyl Nucleotide
  modified_base 6: mod_base = OTHER; note = 2prime Fluoro Nucleotide
  modified_base 7: mod_base = OTHER; note = 2prime-O-methyl Nucleotide
  modified_base 8: mod_base = OTHER; note = 2prime-O-methyl Nucleotide
  modified_base 9: mod_base = OTHER; note = 2prime-O-methyl Nucleotide
  modified_base 10: mod_base = OTHER; note = 2prime-O-methyl Nucleotide
  modified_base 11: mod_base = OTHER; note = 2prime-O-methyl Nucleotide
  modified_base 12: mod_base = OTHER; note = 2prime-O-methyl Nucleotide
  modified_base 13: mod_base = OTHER; note = 2prime-O-methyl Nucleotide
  modified_base 14: mod_base = OTHER; note = 2prime Fluoro Nucleotide
  modified_base 15: mod_base = OTHER; note = 2prime-O-methyl Nucleotide
  modified_base 16: mod_base = OTHER; note = 2prime Fluoro Nucleotide
  modified_base 17: mod_base = OTHER; note = 2prime-O-methyl Nucleotide
  modified_base 18: mod_base = OTHER; note = 2prime-O-methyl Nucleotide
  modified_base 19: mod_base = OTHER; note = 2prime-O-methyl Nucleotide
  modified_base 20: mod_base = OTHER; note = 2prime-O-methyl Nucleotide
  modified_base 21: mod_base = OTHER; note = 2prime-O-methyl Nucleotide
  modified_base 21..22: mod_base = OTHER; note = Phosphorothioate Linkage
  modified_base 22: mod_base = OTHER; note = 2prime-O-methyl Nucleotide
  modified_base 22..23: mod_base = OTHER; note = Phosphorothioate Linkage
  modified_base 23: mod_base = OTHER; note = 2prime-O-methyl Nucleotide
tatgtgaccagcaacgcagccca

SEQ ID NO: 51 - RNA, 23 nt, synthetic construct
  source 1..23: mol_type = other RNA
  modified_base 1: mod_base = OTHER; note = 2prime-O-methyl Nucleotide
  modified_base 1..2: mod_base = OTHER; note = Phosphorothioate Linkage
  modified_base 2: mod_base = OTHER; note = 2prime Fluoro Nucleotide
  modified_base 2..3: mod_base = OTHER; note = Phosphorothioate Linkage
  modified_base 3: mod_base = OTHER; note = 2prime-O-methyl Nucleotide
  modified_base 4: mod_base = OTHER; note = 2prime-O-methyl Nucleotide
  modified_base 5: mod_base = OTHER; note = 2prime-O-methyl Nucleotide
  modified_base 6: mod_base = OTHER; note = 2prime Fluoro Nucleotide
  modified_base 7: mod_base = OTHER; note = 2prime-O-methyl Nucleotide
  modified_base 8: mod_base = OTHER; note = 2prime-O-methyl Nucleotide
  modified_base 9: mod_base = OTHER; note = 2prime-O-methyl Nucleotide
  modified_base 10: mod_base = OTHER; note = 2prime-O-methyl Nucleotide
  modified_base 11: mod_base = OTHER; note = 2prime-O-methyl Nucleotide
  modified_base 12: mod_base = OTHER; note = 2prime-O-methyl Nucleotide
  modified_base 13: mod_base = OTHER; note = 2prime-O-methyl Nucleotide
  modified_base 14: mod_base = OTHER; note = 2prime Fluoro Nucleotide
  modified_base 15: mod_base = OTHER; note = 2prime-O-methyl Nucleotide
  modified_base 16: mod_base = OTHER; note = 2prime Fluoro Nucleotide
  modified_base 17: mod_base = OTHER; note = 2prime-O-methyl Nucleotide
  modified_base 18: mod_base = OTHER; note = 2prime-O-methyl Nucleotide
  modified_base 19: mod_base = OTHER; note = 2prime-O-methyl Nucleotide
  modified_base 20: mod_base = OTHER; note = 2prime-O-methyl Nucleotide
  modified_base 21: mod_base = OTHER; note = 2prime-O-methyl Nucleotide
  modified_base 21..22: mod_base = OTHER; note = Phosphorothioate Linkage
  modified_base 22: mod_base = OTHER; note = 2prime-O-methyl Nucleotide
  modified_base 22..23: mod_base = OTHER; note = Phosphorothioate Linkage
  modified_base 23: mod_base = OTHER; note = 2prime-O-methyl Nucleotide
tatgtgaccagcaacgcagccca

SEQ ID NO: 52 - RNA, 23 nt, synthetic construct
  source 1..23: mol_type = other RNA
  modified_base 1: mod_base = OTHER; note = 2prime-O-methyl Nucleotide
  modified_base 1..2: mod_base = OTHER; note = Phosphorothioate Linkage
  modified_base 2: mod_base = OTHER; note = 2prime Fluoro Nucleotide
  modified_base 2..3: mod_base = OTHER; note = Phosphorothioate Linkage
  modified_base 3: mod_base = OTHER; note = 2prime-O-methyl Nucleotide
  modified_base 4: mod_base = OTHER; note = 2prime-O-methyl Nucleotide
  modified_base 5: mod_base = OTHER; note = 2prime Fluoro Nucleotide
  modified_base 6: mod_base = OTHER; note = 2prime-O-methyl Nucleotide
  modified_base 7: mod_base = OTHER; note = 2prime-O-methyl Nucleotide
  modified_base 8: mod_base = OTHER; note = 2prime-O-methyl Nucleotide
  modified_base 9: mod_base = OTHER; note = 2prime-O-methyl Nucleotide
  modified_base 10: mod_base = OTHER; note = 2prime-O-methyl Nucleotide
  modified_base 11: mod_base = OTHER; note = 2prime-O-methyl Nucleotide
  modified_base 12: mod_base = OTHER; note = 2prime-O-methyl Nucleotide
  modified_base 13: mod_base = OTHER; note = 2prime-O-methyl Nucleotide
  modified_base 14: mod_base = OTHER; note = 2prime Fluoro Nucleotide
  modified_base 15: mod_base = OTHER; note = 2prime-O-methyl Nucleotide
  modified_base 16: mod_base = OTHER; note = 2prime Fluoro Nucleotide
  modified_base 17: mod_base = OTHER; note = 2prime-O-methyl Nucleotide
  modified_base 18: mod_base = OTHER; note = 2prime-O-methyl Nucleotide
  modified_base 19: mod_base = OTHER; note = 2prime-O-methyl Nucleotide
  modified_base 20: mod_base = OTHER; note = 2prime-O-methyl Nucleotide
  modified_base 21: mod_base = OTHER; note = 2prime-O-methyl Nucleotide
  modified_base 21..22: mod_base = OTHER; note = Phosphorothioate Linkage
  modified_base 22: mod_base = OTHER; note = 2prime-O-methyl Nucleotide
  modified_base 22..23: mod_base = OTHER; note = Phosphorothioate Linkage
  modified_base 23: mod_base = OTHER; note = 2prime-O-methyl Nucleotide
tatgtgaccagcaacgcagccca

SEQ ID NO: 53 - RNA, 23 nt, synthetic construct
  source 1..23: mol_type = other RNA
  modified_base 1: mod_base = OTHER; note = 2prime-O-methyl Nucleotide
  modified_base 1..2: mod_base = OTHER; note = Phosphorothioate Linkage
  modified_base 2: mod_base = OTHER; note = 2prime Fluoro Nucleotide
  modified_base 2..3: mod_base = OTHER; note = Phosphorothioate Linkage
  modified_base 3: mod_base = OTHER; note = 2prime-O-methyl Nucleotide
  modified_base 4: mod_base = OTHER; note = 2prime Fluoro Nucleotide
  modified_base 5: mod_base = OTHER; note = 2prime-O-methyl Nucleotide
  modified_base 6: mod_base = OTHER; note = 2prime-O-methyl Nucleotide
  modified_base 7: mod_base = OTHER; note = 2prime-O-methyl Nucleotide
  modified_base 8: mod_base = OTHER; note = 2prime-O-methyl Nucleotide
  modified_base 9: mod_base = OTHER; note = 2prime-O-methyl Nucleotide
  modified_base 10: mod_base = OTHER; note = 2prime-O-methyl Nucleotide
  modified_base 11: mod_base = OTHER; note = 2prime-O-methyl Nucleotide
  modified_base 12: mod_base = OTHER; note = 2prime-O-methyl Nucleotide
  modified_base 13: mod_base = OTHER; note = 2prime-O-methyl Nucleotide
  modified_base 14: mod_base = OTHER; note = 2prime Fluoro Nucleotide
  modified_base 15: mod_base = OTHER; note = 2prime-O-methyl Nucleotide
  modified_base 16: mod_base = OTHER; note = 2prime Fluoro Nucleotide
  modified_base 17: mod_base = OTHER; note = 2prime-O-methyl Nucleotide
  modified_base 18: mod_base = OTHER; note = 2prime-O-methyl Nucleotide
  modified_base 19: mod_base = OTHER; note = 2prime-O-methyl Nucleotide
  modified_base 20: mod_base = OTHER; note = 2prime-O-methyl Nucleotide
  modified_base 21: mod_base = OTHER; note = 2prime-O-methyl Nucleotide
  modified_base 21..22: mod_base = OTHER; note = Phosphorothioate Linkage
  modified_base 22: mod_base = OTHER; note = 2prime-O-methyl Nucleotide
  modified_base 22..23: mod_base = OTHER; note = Phosphorothioate Linkage
  modified_base 23: mod_base = OTHER; note = 2prime-O-methyl Nucleotide
tatgtgaccagcaacgcagccca

SEQ ID NO: 54 - RNA, 23 nt, synthetic construct
  source 1..23: mol_type = other RNA
  modified_base 1: mod_base = OTHER; note = 2prime-O-methyl Nucleotide
  modified_base 1..2: mod_base = OTHER; note = Phosphorothioate Linkage
  modified_base 2: mod_base = OTHER; note = 2prime Fluoro Nucleotide
  modified_base 2..3: mod_base = OTHER; note = Phosphorothioate Linkage
  modified_base 3: mod_base = OTHER; note = 2prime-O-methyl Nucleotide
  modified_base 4: mod_base = OTHER; note = 2prime-O-methyl Nucleotide
  modified_base 5: mod_base = OTHER; note = 2prime-O-methyl Nucleotide
  modified_base 6: mod_base = OTHER; note = 2prime-O-methyl Nucleotide
  modified_base 7: mod_base = OTHER; note = 2prime Fluoro Nucleotide
  modified_base 8: mod_base = OTHER; note = 2prime-O-methyl Nucleotide
  modified_base 9: mod_base = OTHER; note = 2prime-O-methyl Nucleotide
  modified_base 10: mod_base = OTHER; note = 2prime-O-methyl Nucleotide
  modified_base 11: mod_base = OTHER; note = 2prime-O-methyl Nucleotide
  modified_base 12: mod_base = OTHER; note = 2prime-O-methyl Nucleotide
  modified_base 13: mod_base = OTHER; note = 2prime-O-methyl Nucleotide
  modified_base 14: mod_base = OTHER; note = 2prime Fluoro Nucleotide
  modified_base 15: mod_base = OTHER; note = 2prime-O-methyl Nucleotide
  modified_base 16: mod_base = OTHER; note = 2prime Fluoro Nucleotide
  modified_base 17: mod_base = OTHER; note = 2prime-O-methyl Nucleotide
  modified_base 18: mod_base = OTHER; note = 2prime-O-methyl Nucleotide
  modified_base 19: mod_base = OTHER; note = 2prime-O-methyl Nucleotide
  modified_base 20: mod_base = OTHER; note = 2prime-O-methyl Nucleotide
  modified_base 21: mod_base = OTHER; note = 2prime-O-methyl Nucleotide
  modified_base 21..22: mod_base = OTHER; note = Phosphorothioate Linkage
  modified_base 22: mod_base = OTHER; note = 2prime-O-methyl Nucleotide
  modified_base 22..23: mod_base = OTHER; note = Phosphorothioate Linkage
  modified_base 23: mod_base = OTHER; note = 2prime-O-methyl Nucleotide
tatgtgaccagcaacgcagccca

SEQ ID NO: 55 - RNA, 23 nt, synthetic construct
  source 1..23: mol_type = other RNA
  modified_base 1: mod_base = OTHER; note = 2prime-O-methyl Nucleotide
  modified_base 1..2: mod_base = OTHER; note = Phosphorothioate Linkage
  modified_base 2: mod_base = OTHER; note = 2prime Fluoro Nucleotide
  modified_base 2..3: mod_base = OTHER; note = Phosphorothioate Linkage
  modified_base 3: mod_base = OTHER; note = 2prime Fluoro Nucleotide
  modified_base 4: mod_base = OTHER; note = 2prime-O-methyl Nucleotide
  modified_base 5: mod_base = OTHER; note = 2prime-O-methyl Nucleotide
  modified_base 6: mod_base = OTHER; note = 2prime-O-methyl Nucleotide
  modified_base 7: mod_base = OTHER; note = 2prime Fluoro Nucleotide
  modified_base 8: mod_base = OTHER; note = 2prime-O-methyl Nucleotide
  modified_base 9: mod_base = OTHER; note = 2prime-O-methyl Nucleotide
  modified_base 10: mod_base = OTHER; note = 2prime-O-methyl Nucleotide
  modified_base 11: mod_base = OTHER; note = 2prime-O-methyl Nucleotide
  modified_base 12: mod_base = OTHER; note = 2prime-O-methyl Nucleotide
  modified_base 13: mod_base = OTHER; note = 2prime-O-methyl Nucleotide
  modified_base 14: mod_base = OTHER; note = 2prime Fluoro Nucleotide
  modified_base 15: mod_base = OTHER; note = 2prime-O-methyl Nucleotide
  modified_base 16: mod_base = OTHER; note = 2prime Fluoro Nucleotide
  modified_base 17: mod_base = OTHER; note = 2prime-O-methyl Nucleotide
  modified_base 18: mod_base = OTHER; note = 2prime-O-methyl Nucleotide
  modified_base 19: mod_base = OTHER; note = 2prime-O-methyl Nucleotide
  modified_base 20: mod_base = OTHER; note = 2prime-O-methyl Nucleotide
  modified_base 21: mod_base = OTHER; note = 2prime-O-methyl Nucleotide
  modified_base 21..22: mod_base = OTHER; note = Phosphorothioate Linkage
  modified_base 22: mod_base = OTHER; note = 2prime-O-methyl Nucleotide
  modified_base 22..23: mod_base = OTHER; note = Phosphorothioate Linkage
  modified_base 23: mod_base = OTHER; note = 2prime-O-methyl Nucleotide
tatgtgaccagcaacgcagccca

SEQ ID NO: 56 - RNA, 23 nt, synthetic construct
  source 1..23: mol_type = other RNA
  modified_base 1: mod_base = OTHER; note = 2prime-O-methyl Nucleotide
  modified_base 1..2: mod_base = OTHER; note = Phosphorothioate Linkage
  modified_base 2: mod_base = OTHER; note = 2prime Fluoro Nucleotide
  modified_base 2..3: mod_base = OTHER; note = Phosphorothioate Linkage
  modified_base 3: mod_base = OTHER; note = 2prime-O-methyl Nucleotide
  modified_base 4: mod_base = OTHER; note = 2prime-O-methyl Nucleotide
  modified_base 5: mod_base = OTHER; note = 2prime Fluoro Nucleotide
  modified_base 6: mod_base = OTHER; note = 2prime-O-methyl Nucleotide
  modified_base 7: mod_base = OTHER; note = 2prime Fluoro Nucleotide
  modified_base 8: mod_base = OTHER; note = 2prime-O-methyl Nucleotide
  modified_base 9: mod_base = OTHER; note = 2prime-O-methyl Nucleotide
  modified_base 10: mod_base = OTHER; note = 2prime-O-methyl Nucleotide
  modified_base 11: mod_base = OTHER; note = 2prime-O-methyl Nucleotide
  modified_base 12: mod_base = OTHER; note = 2prime-O-methyl Nucleotide
  modified_base 13: mod_base = OTHER; note = 2prime-O-methyl Nucleotide
  modified_base 14: mod_base = OTHER; note = 2prime Fluoro Nucleotide
  modified_base 15: mod_base = OTHER; note = 2prime-O-methyl Nucleotide
  modified_base 16: mod_base = OTHER; note = 2prime Fluoro Nucleotide
  modified_base 17: mod_base = OTHER; note = 2prime-O-methyl Nucleotide
  modified_base 18: mod_base = OTHER; note = 2prime-O-methyl Nucleotide
  modified_base 19: mod_base = OTHER; note = 2prime-O-methyl Nucleotide
  modified_base 20: mod_base = OTHER; note = 2prime-O-methyl Nucleotide
  modified_base 21: mod_base = OTHER; note = 2prime-O-methyl Nucleotide
  modified_base 21..22: mod_base = OTHER; note = Phosphorothioate Linkage
  modified_base 22: mod_base = OTHER; note = 2prime-O-methyl Nucleotide
  modified_base 22..23: mod_base = OTHER; note = Phosphorothioate Linkage
  modified_base 23: mod_base = OTHER; note = 2prime-O-methyl Nucleotide
tatgtgaccagcaacgcagccca

SEQ ID NO: 57 - RNA, 23 nt, synthetic construct
  source 1..23: mol_type = other RNA
  modified_base 1: mod_base = OTHER; note = 2prime-O-methyl Nucleotide
  modified_base 1..2: mod_base = OTHER; note = Phosphorothioate Linkage
  modified_base 2: mod_base = OTHER; note = 2prime Fluoro Nucleotide
  modified_base 2..3: mod_base = OTHER; note = Phosphorothioate Linkage
  modified_base 3: mod_base = OTHER; note = 2prime-O-methyl Nucleotide
  modified_base 4: mod_base = OTHER; note = 2prime-O-methyl Nucleotide
  modified_base 5: mod_base = OTHER; note = 2prime Fluoro Nucleotide
  modified_base 6: mod_base = OTHER; note = 2prime-O-methyl Nucleotide
  modified_base 7: mod_base = OTHER; note = 2prime Fluoro Nucleotide
  modified_base 8: mod_base = OTHER; note = 2prime-O-methyl Nucleotide
  modified_base 9: mod_base = OTHER; note = 2prime-O-methyl Nucleotide
  modified_base 10: mod_base = OTHER; note = 2prime-O-methyl Nucleotide
  modified_base 11: mod_base = OTHER; note = 2prime-O-methyl Nucleotide
  modified_base 12: mod_base = OTHER; note = 2prime-O-methyl Nucleotide
  modified_base 13: mod_base = OTHER; note = 2prime-O-methyl Nucleotide
  modified_base 14: mod_base = OTHER; note = 2prime Fluoro Nucleotide
  modified_base 15: mod_base = OTHER; note = 2prime-O-methyl Nucleotide
  modified_base 16: mod_base = OTHER; note = 2prime Fluoro Nucleotide
  modified_base 17: mod_base = OTHER; note = 2prime-O-methyl Nucleotide
  modified_base 18: mod_base = OTHER; note = 2prime-O-methyl Nucleotide
  modified_base 19: mod_base = OTHER; note = 2prime-O-methyl Nucleotide
  modified_base 20: mod_base = OTHER; note = 2prime-O-methyl Nucleotide
  modified_base 21: mod_base = OTHER; note = 2prime-O-methyl Nucleotide
  modified_base 21..22: mod_base = OTHER; note = Phosphorothioate Linkage
  modified_base 22: mod_base = OTHER; note = 2prime-O-methyl Nucleotide
  modified_base 22..23: mod_base = OTHER; note = Phosphorothioate Linkage
  modified_base 23: mod_base = OTHER; note = 2prime-O-methyl Nucleotide
tatgtgaccagcaacgcagccca

SEQ ID NO: 58 - RNA, 23 nt, synthetic construct
  source 1..23: mol_type = other RNA
  modified_base 1: mod_base = OTHER; note = 2prime-O-methyl Nucleotide
  modified_base 1..2: mod_base = OTHER; note = Phosphorothioate Linkage
  modified_base 2: mod_base = OTHER; note = 2prime Fluoro Nucleotide
  modified_base 2..3: mod_base = OTHER; note = Phosphorothioate Linkage
  modified_base 3: mod_base = OTHER; note = 2prime-O-methyl Nucleotide
  modified_base 4: mod_base = OTHER; note = 2prime-O-methyl Nucleotide
  modified_base 5: mod_base = OTHER; note = 2prime Fluoro Nucleotide
  modified_base 6: mod_base = OTHER; note = 2prime-O-methyl Nucleotide
  modified_base 7: mod_base = OTHER; note = 2prime Fluoro Nucleotide
  modified_base 8: mod_base = OTHER; note = 2prime-O-methyl Nucleotide
  modified_base 9: mod_base = OTHER; note = 2prime-O-methyl Nucleotide
  modified_base 10: mod_base = OTHER; note = 2prime-O-methyl Nucleotide
  modified_base 11: mod_base = OTHER; note = 2prime-O-methyl Nucleotide
  modified_base 12: mod_base = OTHER; note = 2prime-O-methyl Nucleotide
  modified_base 13: mod_base = OTHER; note = 2prime-O-methyl Nucleotide
  modified_base 14: mod_base = OTHER; note = 2prime Fluoro Nucleotide
  modified_base 15: mod_base = OTHER; note = 2prime-O-methyl Nucleotide
  modified_base 16: mod_base = OTHER; note = 2prime Fluoro Nucleotide
  modified_base 17: mod_base = OTHER; note = 2prime-O-methyl Nucleotide
  modified_base 18: mod_base = OTHER; note = 2prime-O-methyl Nucleotide
  modified_base 19: mod_base = OTHER; note = 2prime-O-methyl Nucleotide
  modified_base 20: mod_base = OTHER; note = 2prime-O-methyl Nucleotide
  modified_base 21: mod_base = OTHER; note = 2prime-O-methyl Nucleotide
  modified_base 21..22: mod_base = OTHER; note = Phosphorothioate Linkage
  modified_base 22: mod_base = OTHER; note = 2prime-O-methyl Nucleotide
  modified_base 22..23: mod_base = OTHER; note = Phosphorothioate Linkage
  modified_base 23: mod_base = OTHER; note = 2prime-O-methyl Nucleotide
tatgtgaccagcaacgcagccca

SEQ ID NO: 59 - RNA, 23 nt, synthetic construct
  source 1..23: mol_type = other RNA
  modified_base 1: mod_base = OTHER; note = 2prime-O-methyl Nucleotide
  modified_base 1..2: mod_base = OTHER; note = Phosphorothioate Linkage
  modified_base 2: mod_base = OTHER; note = 2prime Fluoro Nucleotide
  modified_base 2..3: mod_base = OTHER; note = Phosphorothioate Linkage
  modified_base 3: mod_base = OTHER; note = 2prime-O-methyl Nucleotide
  modified_base 4: mod_base = OTHER; note = 2prime-O-methyl Nucleotide
  modified_base 5: mod_base = OTHER; note = 2prime Fluoro Nucleotide
  modified_base 6: mod_base = OTHER; note = 2prime-O-methyl Nucleotide
  modified_base 7: mod_base = OTHER; note = 2prime Fluoro Nucleotide
  modified_base 8: mod_base = OTHER; note = 2prime-O-methyl Nucleotide
  modified_base 9: mod_base = OTHER; note = 2prime-O-methyl Nucleotide
  modified_base 10: mod_base = OTHER; note = 2prime-O-methyl Nucleotide
  modified_base 11: mod_base = OTHER; note = 2prime-O-methyl Nucleotide
  modified_base 12: mod_base = OTHER; note = 2prime-O-methyl Nucleotide
  modified_base 13: mod_base = OTHER; note = 2prime-O-methyl Nucleotide
  modified_base 14: mod_base = OTHER; note = 2prime Fluoro Nucleotide
  modified_base 15: mod_base = OTHER; note = 2prime-O-methyl Nucleotide
  modified_base 16: mod_base = OTHER; note = 2prime Fluoro Nucleotide
  modified_base 17: mod_base = OTHER; note = 2prime-O-methyl Nucleotide
  modified_base 18: mod_base = OTHER; note = 2prime-O-methyl Nucleotide
  modified_base 19: mod_base = OTHER; note = 2prime-O-methyl Nucleotide
  modified_base 20: mod_base = OTHER; note = 2prime-O-methyl Nucleotide
  modified_base 21: mod_base = OTHER; note = 2prime-O-methyl Nucleotide
  modified_base 21..22: mod_base = OTHER; note = Phosphorothioate Linkage
  modified_base 22: mod_base = OTHER; note = 2prime-O-methyl Nucleotide
  modified_base 22..23: mod_base = OTHER; note = Phosphorothioate Linkage
  modified_base 23: mod_base = OTHER; note = 2prime-O-methyl Nucleotide
tatgtgaccagcaacgcagccca

SEQ ID NO: 60 - RNA, 23 nt, synthetic construct
  source 1..23: mol_type = other RNA
  modified_base 1: mod_base = OTHER; note = 2prime-O-methyl Nucleotide
  modified_base 1..2: mod_base = OTHER; note = Phosphorothioate Linkage
  modified_base 2: mod_base = OTHER; note = 2prime Fluoro Nucleotide
  modified_base 2..3: mod_base = OTHER; note = Phosphorothioate Linkage
  modified_base 3: mod_base = OTHER; note = 2prime-O-methyl Nucleotide
  modified_base 4: mod_base = OTHER; note = 2prime-O-methyl Nucleotide
  modified_base 5: mod_base = OTHER; note = 2prime Fluoro Nucleotide
  modified_base 6: mod_base = OTHER; note = 2prime-O-methyl Nucleotide
  modified_base 7: mod_base = OTHER; note = 2prime Fluoro Nucleotide
  modified_base 8: mod_base = OTHER; note = 2prime-O-methyl Nucleotide
  modified_base 9: mod_base = OTHER; note = 2prime-O-methyl Nucleotide
  modified_base 10: mod_base = OTHER; note = 2prime-O-methyl Nucleotide
  modified_base 11: mod_base = OTHER; note = 2prime-O-methyl Nucleotide
  modified_base 12: mod_base = OTHER; note = 2prime-O-methyl Nucleotide
  modified_base 13: mod_base = OTHER; note = 2prime-O-methyl Nucleotide
  modified_base 14: mod_base = OTHER; note = 2prime Fluoro Nucleotide
  modified_base 15: mod_base = OTHER; note = 2prime-O-methyl Nucleotide
  modified_base 16: mod_base = OTHER; note = 2prime Fluoro Nucleotide
  modified_base 17: mod_base = OTHER; note = 2prime-O-methyl Nucleotide
  modified_base 18: mod_base = OTHER; note = 2prime-O-methyl Nucleotide
  modified_base 19: mod_base = OTHER; note = 2prime-O-methyl Nucleotide
  modified_base 20: mod_base = OTHER; note = 2prime-O-methyl Nucleotide
  modified_base 21: mod_base = OTHER; note = 2prime-O-methyl Nucleotide
  modified_base 21..22: mod_base = OTHER; note = Phosphorothioate Linkage
  modified_base 22: mod_base = OTHER; note = 2prime-O-methyl Nucleotide
  modified_base 22..23: mod_base = OTHER; note = Phosphorothioate Linkage
  modified_base 23: mod_base = OTHER; note = 2prime-O-methyl Nucleotide
tatgtgaccagcaacgcagccca

SEQ ID NO: 61 - RNA, 23 nt, synthetic construct
  source 1..23: mol_type = other RNA
  modified_base 1: mod_base = OTHER; note = 2prime-O-methyl Nucleotide
  modified_base 1..2: mod_base = OTHER; note = Phosphorothioate Linkage
  modified_base 2: mod_base = OTHER; note = 2prime Fluoro Nucleotide
  modified_base 2..3: mod_base = OTHER; note = Phosphorothioate Linkage
  modified_base 3: mod_base = OTHER; note = 2prime-O-methyl Nucleotide
  modified_base 4: mod_base = OTHER; note = 2prime-O-methyl Nucleotide
  modified_base 5: mod_base = OTHER; note = 2prime-O-methyl Nucleotide
  modified_base 6: mod_base = OTHER; note = 2prime Fluoro Nucleotide
  modified_base 7: mod_base = OTHER; note = 2prime-O-methyl Nucleotide
  modified_base 8: mod_base = OTHER; note = 2prime-O-methyl Nucleotide
  modified_base 9: mod_base = OTHER; note = 2prime-O-methyl Nucleotide
  modified_base 10: mod_base = OTHER; note = 2prime-O-methyl Nucleotide
  modified_base 11: mod_base = OTHER; note = 2prime-O-methyl Nucleotide
  modified_base 12: mod_base = OTHER; note = 2prime-O-methyl Nucleotide
  modified_base 13: mod_base = OTHER; note = 2prime-O-methyl Nucleotide
  modified_base 14: mod_base = OTHER; note = 2prime Fluoro Nucleotide
  modified_base 15: mod_base = OTHER; note = 2prime-O-methyl Nucleotide
  modified_base 16: mod_base = OTHER; note = 2prime Fluoro Nucleotide
  modified_base 17: mod_base = OTHER; note = 2prime-O-methyl Nucleotide
  modified_base 18: mod_base = OTHER; note = 2prime-O-methyl Nucleotide
  modified_base 19: mod_base = OTHER; note = 2prime-O-methyl Nucleotide
  modified_base 20: mod_base = OTHER; note = 2prime-O-methyl Nucleotide
  modified_base 21: mod_base = OTHER; note = 2prime-O-methyl Nucleotide
  modified_base 21..22: mod_base = OTHER; note = Phosphorothioate Linkage
  modified_base 22: mod_base = OTHER; note = 2prime-O-methyl Nucleotide
  modified_base 22..23: mod_base = OTHER; note = Phosphorothioate Linkage
  modified_base 23: mod_base = OTHER; note = 2prime-O-methyl Nucleotide
  modified_base 1: mod_base = OTHER; note = 5prime-vinylphosphonate linked to uracil
tatgtgaccagcaacgcagccca

SEQ ID NO: 62 - RNA, 23 nt, synthetic construct
  source 1..23: mol_type = other RNA
  modified_base 1: mod_base = OTHER; note = 2prime-O-methyl Nucleotide
  modified_base 1..2: mod_base = OTHER; note = Phosphorothioate Linkage
  modified_base 2: mod_base = OTHER; note = 2prime Fluoro Nucleotide
  modified_base 2..3: mod_base = OTHER; note = Phosphorothioate Linkage
  modified_base 3: mod_base = OTHER; note = 2prime-O-methyl Nucleotide
  modified_base 4: mod_base = OTHER; note = 2prime-O-methyl Nucleotide
  modified_base 5: mod_base = OTHER; note = 2prime Fluoro Nucleotide
  modified_base 6: mod_base = OTHER; note = 2prime-O-methyl Nucleotide
  modified_base 7: mod_base = OTHER; note = 2prime Fluoro Nucleotide
  modified_base 8: mod_base = OTHER; note = 2prime-O-methyl Nucleotide
  modified_base 9: mod_base = OTHER; note = 2prime-O-methyl Nucleotide
  modified_base 10: mod_base = OTHER; note = 2prime-O-methyl Nucleotide
  modified_base 11: mod_base = OTHER; note = 2prime-O-methyl Nucleotide
  modified_base 12: mod_base = OTHER; note = 2prime-O-methyl Nucleotide
  modified_base 13: mod_base = OTHER; note = 2prime-O-methyl Nucleotide
  modified_base 14: mod_base = OTHER; note = 2prime Fluoro Nucleotide
  modified_base 15: mod_base = OTHER; note = 2prime-O-methyl Nucleotide
  modified_base 16: mod_base = OTHER; note = 2prime Fluoro Nucleotide
  modified_base 17: mod_base = OTHER; note = 2prime-O-methyl Nucleotide
  modified_base 18: mod_base = OTHER; note = 2prime-O-methyl Nucleotide
  modified_base 19: mod_base = OTHER; note = 2prime-O-methyl Nucleotide
  modified_base 20: mod_base = OTHER; note = 2prime-O-methyl Nucleotide
  modified_base 21: mod_base = OTHER; note = 2prime-O-methyl Nucleotide
  modified_base 21..22: mod_base = OTHER; note = Phosphorothioate Linkage
  modified_base 22: mod_base = OTHER; note = 2prime-O-methyl Nucleotide
  modified_base 22..23: mod_base = OTHER; note = Phosphorothioate Linkage
  modified_base 23: mod_base = OTHER; note = 2prime-O-methyl Nucleotide
  modified_base 1: mod_base = OTHER; note = 5prime-vinylphosphonate linked to uracil
tatgtgaccagcaacgcagccca

SEQ ID NO: 63 - RNA, 23 nt, synthetic construct
  source 1..23: mol_type = other RNA
  modified_base 1: mod_base = OTHER; note = 2prime-O-methyl Nucleotide
  modified_base 1..2: mod_base = OTHER; note = Phosphorothioate Linkage
  modified_base 2: mod_base = OTHER; note = 2prime Fluoro Nucleotide
  modified_base 2..3: mod_base = OTHER; note = Phosphorothioate Linkage
  modified_base 3: mod_base = OTHER; note = 2prime-O-methyl Nucleotide
  modified_base 4: mod_base = OTHER; note = 2prime-O-methyl Nucleotide
  modified_base 5: mod_base = OTHER; note = 2prime-O-methyl Nucleotide
  modified_base 6: mod_base = OTHER; note = 2prime Fluoro Nucleotide
  modified_base 7: mod_base = OTHER; note = 2prime-O-methyl Nucleotide
  modified_base 8: mod_base = OTHER; note = 2prime-O-methyl Nucleotide
  modified_base 9: mod_base = OTHER; note = 2prime-O-methyl Nucleotide
  modified_base 10: mod_base = OTHER; note = 2prime-O-methyl Nucleotide
  modified_base 11: mod_base = OTHER; note = 2prime-O-methyl Nucleotide
  modified_base 12: mod_base = OTHER; note = 2prime-O-methyl Nucleotide
  modified_base 13: mod_base = OTHER; note = 2prime-O-methyl Nucleotide
  modified_base 14: mod_base = OTHER; note = 2prime Fluoro Nucleotide
  modified_base 15: mod_base = OTHER; note = 2prime-O-methyl Nucleotide
  modified_base 16: mod_base = OTHER; note = 2prime Fluoro Nucleotide
  modified_base 17: mod_base = OTHER; note = 2prime-O-methyl Nucleotide
  modified_base 18: mod_base = OTHER; note = 2prime-O-methyl Nucleotide
  modified_base 19: mod_base = OTHER; note = 2prime-O-methyl Nucleotide
  modified_base 20: mod_base = OTHER; note = 2prime-O-methyl Nucleotide
  modified_base 21: mod_base = OTHER; note = 2prime-O-methyl Nucleotide
  modified_base 21..22: mod_base = OTHER; note = Phosphorothioate Linkage
  modified_base 22: mod_base = OTHER; note = 2prime-O-methyl Nucleotide
  modified_base 22..23: mod_base = OTHER; note = Phosphorothioate Linkage
  modified_base 23: mod_base = OTHER; note = 2prime-O-methyl Nucleotide
tccagttccgatttgtaggcctt

SEQ ID NO: 64 - RNA, 23 nt, synthetic construct
  source 1..23: mol_type = other RNA
  modified_base 1: mod_base = OTHER; note = 2prime-O-methyl Nucleotide
  modified_base 1..2: mod_base = OTHER; note = Phosphorothioate Linkage
  modified_base 2: mod_base = OTHER; note = 2prime Fluoro Nucleotide
  modified_base 2..3: mod_base = OTHER; note = Phosphorothioate Linkage
  modified_base 3: mod_base = OTHER; note = 2prime-O-methyl Nucleotide
  modified_base 4: mod_base = OTHER; note = 2prime-O-methyl Nucleotide
  modified_base 5: mod_base = OTHER; note = 2prime Fluoro Nucleotide
  modified_base 6: mod_base = OTHER; note = 2prime-O-methyl Nucleotide
  modified_base 7: mod_base = OTHER; note = 2prime-O-methyl Nucleotide
  modified_base 8: mod_base = OTHER; note = 2prime-O-methyl Nucleotide
  modified_base 9: mod_base = OTHER; note = 2prime-O-methyl Nucleotide
  modified_base 10: mod_base = OTHER; note = 2prime-O-methyl Nucleotide
  modified_base 11: mod_base = OTHER; note = 2prime-O-methyl Nucleotide
  modified_base 12: mod_base = OTHER; note = 2prime-O-methyl Nucleotide
  modified_base 13: mod_base = OTHER; note = 2prime-O-methyl Nucleotide
  modified_base 14: mod_base = OTHER; note = 2prime Fluoro Nucleotide
  modified_base 15: mod_base = OTHER; note = 2prime-O-methyl Nucleotide
  modified_base 16: mod_base = OTHER; note = 2prime Fluoro Nucleotide
  modified_base 17: mod_base = OTHER; note = 2prime-O-methyl Nucleotide
  modified_base 18: mod_base = OTHER; note = 2prime-O-methyl Nucleotide
  modified_base 19: mod_base = OTHER; note = 2prime-O-methyl Nucleotide
  modified_base 20: mod_base = OTHER; note = 2prime-O-methyl Nucleotide
  modified_base 21: mod_base = OTHER; note = 2prime-O-methyl Nucleotide
  modified_base 21..22: mod_base = OTHER; note = Phosphorothioate Linkage
  modified_base 22: mod_base = OTHER; note = 2prime-O-methyl Nucleotide
  modified_base 22..23: mod_base = OTHER; note = Phosphorothioate Linkage
  modified_base 23: mod_base = OTHER; note = 2prime-O-methyl Nucleotide
tccagttccgatttgtaggcctt

SEQ ID NO: 65 - RNA, 23 nt, synthetic construct
  source 1..23: mol_type = other RNA
  modified_base 1: mod_base = OTHER; note = 2prime-O-methyl Nucleotide
  modified_base 1..2: mod_base = OTHER; note = Phosphorothioate Linkage
  modified_base 2: mod_base = OTHER; note = 2prime Fluoro Nucleotide
  modified_base 2..3: mod_base = OTHER; note = Phosphorothioate Linkage
  modified_base 3: mod_base = OTHER; note = 2prime-O-methyl Nucleotide
  modified_base 4: mod_base = OTHER; note = 2prime Fluoro Nucleotide
  modified_base 5: mod_base = OTHER; note = 2prime-O-methyl Nucleotide
  modified_base 6: mod_base = OTHER; note = 2prime-O-methyl Nucleotide
  modified_base 7: mod_base = OTHER; note = 2prime-O-methyl Nucleotide
  modified_base 8: mod_base = OTHER; note = 2prime-O-methyl Nucleotide
  modified_base 9: mod_base = OTHER; note = 2prime-O-methyl Nucleotide
  modified_base 10: mod_base = OTHER; note = 2prime-O-methyl Nucleotide
  modified_base 11: mod_base = OTHER; note = 2prime-O-methyl Nucleotide
  modified_base 12: mod_base = OTHER; note = 2prime-O-methyl Nucleotide
  modified_base 13: mod_base = OTHER; note = 2prime-O-methyl Nucleotide
  modified_base 14: mod_base = OTHER; note = 2prime Fluoro Nucleotide
  modified_base 15: mod_base = OTHER; note = 2prime-O-methyl Nucleotide
  modified_base 16: mod_base = OTHER; note = 2prime Fluoro Nucleotide
  modified_base 17: mod_base = OTHER; note = 2prime-O-methyl Nucleotide
  modified_base 18: mod_base = OTHER; note = 2prime-O-methyl Nucleotide
  modified_base 19: mod_base = OTHER; note = 2prime-O-methyl Nucleotide
  modified_base 20: mod_base = OTHER; note = 2prime-O-methyl Nucleotide
  modified_base 21: mod_base = OTHER; note = 2prime-O-methyl Nucleotide
  modified_base 21..22: mod_base = OTHER; note = Phosphorothioate Linkage
  modified_base 22: mod_base = OTHER; note = 2prime-O-methyl Nucleotide
  modified_base 22..23: mod_base = OTHER; note = Phosphorothioate Linkage
  modified_base 23: mod_base = OTHER; note = 2prime-O-methyl Nucleotide
tccagttccgatttgtaggcctt

SEQ ID NO: 66 - RNA, 23 nt, synthetic construct
  source 1..23: mol_type = other RNA
  modified_base 1: mod_base = OTHER; note = 2prime-O-methyl Nucleotide
  modified_base 1..2: mod_base = OTHER; note = Phosphorothioate Linkage
  modified_base 2: mod_base = OTHER; note = 2prime Fluoro Nucleotide
  modified_base 2..3: mod_base = OTHER; note = Phosphorothioate Linkage
  modified_base 3: mod_base = OTHER; note = 2prime-O-methyl Nucleotide
  modified_base 4: mod_base = OTHER; note = 2prime-O-methyl Nucleotide
  modified_base 5: mod_base = OTHER; note = 2prime-O-methyl Nucleotide
  modified_base 6: mod_base = OTHER; note = 2prime-O-methyl Nucleotide
  modified_base 7: mod_base = OTHER; note = 2prime Fluoro Nucleotide
  modified_base 8: mod_base = OTHER; note = 2prime-O-methyl Nucleotide
  modified_base 9: mod_base = OTHER; note = 2prime-O-methyl Nucleotide
  modified_base 10: mod_base = OTHER; note = 2prime-O-methyl Nucleotide
  modified_base 11: mod_base = OTHER; note = 2prime-O-methyl Nucleotide
  modified_base 12: mod_base = OTHER; note = 2prime-O-methyl Nucleotide
  modified_base 13: mod_base = OTHER; note = 2prime-O-methyl Nucleotide
  modified_base 14: mod_base = OTHER; note = 2prime Fluoro Nucleotide
  modified_base 15: mod_base = OTHER; note = 2prime-O-methyl Nucleotide
  modified_base 16: mod_base = OTHER; note = 2prime Fluoro Nucleotide
  modified_base 17: mod_base = OTHER; note = 2prime-O-methyl Nucleotide
  modified_base 18: mod_base = OTHER; note = 2prime-O-methyl Nucleotide
  modified_base 19: mod_base = OTHER; note = 2prime-O-methyl Nucleotide
  modified_base 20: mod_base = OTHER; note = 2prime-O-methyl Nucleotide
  modified_base 21: mod_base = OTHER; note = 2prime-O-methyl Nucleotide
  modified_base 21..22: mod_base = OTHER; note = Phosphorothioate Linkage
  modified_base 22: mod_base = OTHER; note = 2prime-O-methyl Nucleotide
  modified_base 22..23: mod_base = OTHER; note = Phosphorothioate Linkage
  modified_base 23: mod_base = OTHER; note = 2prime-O-methyl Nucleotide
tccagttccgatttgtaggcctt

SEQ ID NO: 67 - RNA, 23 nt, synthetic construct
  source 1..23: mol_type = other RNA
  modified_base 1: mod_base = OTHER; note = 2prime-O-methyl Nucleotide
  modified_base 1..2: mod_base = OTHER; note = Phosphorothioate Linkage
  modified_base 2: mod_base = OTHER; note = 2prime Fluoro Nucleotide
  modified_base 2..3: mod_base = OTHER; note = Phosphorothioate Linkage
  modified_base 3: mod_base = OTHER; note = 2prime Fluoro Nucleotide
  modified_base 4: mod_base = OTHER; note = 2prime-O-methyl Nucleotide
  modified_base 5: mod_base = OTHER; note = 2prime-O-methyl Nucleotide
  modified_base 6: mod_base = OTHER; note = 2prime-O-methyl Nucleotide
  modified_base 7: mod_base = OTHER; note = 2prime Fluoro Nucleotide
  modified_base 8: mod_base = OTHER; note = 2prime-O-methyl Nucleotide
  modified_base 9: mod_base = OTHER; note = 2prime-O-methyl Nucleotide
  modified_base 10: mod_base = OTHER; note = 2prime-O-methyl Nucleotide
  modified_base 11: mod_base = OTHER; note = 2prime-O-methyl Nucleotide
  modified_base 12: mod_base = OTHER; note = 2prime-O-methyl Nucleotide
  modified_base 13: mod_base = OTHER; note = 2prime-O-methyl Nucleotide
  modified_base 14: mod_base = OTHER; note = 2prime Fluoro Nucleotide
  modified_base 15: mod_base = OTHER; note = 2prime-O-methyl Nucleotide
  modified_base 16: mod_base = OTHER; note = 2prime Fluoro Nucleotide
  modified_base 17: mod_base = OTHER; note = 2prime-O-methyl Nucleotide
  modified_base 18: mod_base = OTHER; note = 2prime-O-methyl Nucleotide
  modified_base 19: mod_base = OTHER; note = 2prime-O-methyl Nucleotide
  modified_base 20: mod_base = OTHER; note = 2prime-O-methyl Nucleotide
  modified_base 21: mod_base = OTHER; note = 2prime-O-methyl Nucleotide
  modified_base 21..22: mod_base = OTHER; note = Phosphorothioate Linkage
  modified_base 22: mod_base = OTHER; note = 2prime-O-methyl Nucleotide
  modified_base 22..23: mod_base = OTHER; note = Phosphorothioate Linkage
  modified_base 23: mod_base = OTHER; note = 2prime-O-methyl Nucleotide
tccagttccgatttgtaggcctt

SEQ ID NO: 68 - RNA, 23 nt, synthetic construct
  source 1..23: mol_type = other RNA
  modified_base 1: mod_base = OTHER; note = 2prime-O-methyl Nucleotide
  modified_base 1..2: mod_base = OTHER; note = Phosphorothioate Linkage
  modified_base 2: mod_base = OTHER; note = 2prime Fluoro Nucleotide
  modified_base 2..3: mod_base = OTHER; note = Phosphorothioate Linkage
  modified_base 3: mod_base = OTHER; note = 2prime-O-methyl Nucleotide
  modified_base 4: mod_base = OTHER; note = 2prime-O-methyl Nucleotide
  modified_base 5: mod_base = OTHER; note = 2prime Fluoro Nucleotide
  modified_base 6: mod_base = OTHER; note = 2prime-O-methyl Nucleotide
  modified_base 7: mod_base = OTHER; note = 2prime Fluoro Nucleotide
  modified_base 8: mod_base = OTHER; note = 2prime-O-methyl Nucleotide
  modified_base 9: mod_base = OTHER; note = 2prime-O-methyl Nucleotide
  modified_base 10: mod_base = OTHER; note = 2prime-O-methyl Nucleotide
  modified_base 11: mod_base = OTHER; note = 2prime-O-methyl Nucleotide
  modified_base 12: mod_base = OTHER; note = 2prime-O-methyl Nucleotide
  modified_base 13: mod_base = OTHER; note = 2prime-O-methyl Nucleotide
  modified_base 14: mod_base = OTHER; note = 2prime Fluoro Nucleotide
  modified_base 15: mod_base = OTHER; note = 2prime-O-methyl Nucleotide
  modified_base 16: mod_base = OTHER; note = 2prime Fluoro Nucleotide
  modified_base 17: mod_base = OTHER; note = 2prime-O-methyl Nucleotide
  modified_base 18: mod_base = OTHER; note = 2prime-O-methyl Nucleotide
  modified_base 19: mod_base = OTHER; note = 2prime-O-methyl Nucleotide
  modified_base 20: mod_base = OTHER; note = 2prime-O-methyl Nucleotide
  modified_base 21: mod_base = OTHER; note = 2prime-O-methyl Nucleotide
  modified_base 21..22: mod_base = OTHER; note = Phosphorothioate Linkage
  modified_base 22: mod_base = OTHER; note = 2prime-O-methyl Nucleotide
  modified_base 22..23: mod_base = OTHER; note = Phosphorothioate Linkage
  modified_base 23: mod_base = OTHER; note = 2prime-O-methyl Nucleotide
tccagttccgatttgtaggcctt

SEQ ID NO: 69 - RNA, 23 nt, synthetic construct
  source 1..23: mol_type = other RNA
  modified_base 1: mod_base = OTHER; note = 2prime-O-methyl Nucleotide
  modified_base 1..2: mod_base = OTHER; note = Phosphorothioate Linkage
  modified_base 2: mod_base = OTHER; note = 2prime Fluoro Nucleotide
  modified_base 2..3: mod_base = OTHER; note = Phosphorothioate Linkage
  modified_base 3: mod_base = OTHER; note = 2prime-O-methyl Nucleotide
  modified_base 4: mod_base = OTHER; note = 2prime-O-methyl Nucleotide
  modified_base 5: mod_base = OTHER; note = 2prime Fluoro Nucleotide
  modified_base 6: mod_base = OTHER; note = 2prime-O-methyl Nucleotide
  modified_base 7: mod_base = OTHER; note = 2prime Fluoro Nucleotide
  modified_base 8: mod_base = OTHER; note = 2prime-O-methyl Nucleotide
  modified_base 9: mod_base = OTHER; note = 2prime-O-methyl Nucleotide
  modified_base 10: mod_base = OTHER; note = 2prime-O-methyl Nucleotide
  modified_base 11: mod_base = OTHER; note = 2prime-O-methyl Nucleotide
  modified_base 12: mod_base = OTHER; note = 2prime-O-methyl Nucleotide
  modified_base 13: mod_base = OTHER; note = 2prime-O-methyl Nucleotide
  modified_base 14: mod_base = OTHER; note = 2prime Fluoro Nucleotide
  modified_base 15: mod_base = OTHER; note = 2prime-O-methyl Nucleotide
  modified_base 16: mod_base = OTHER; note = 2prime Fluoro Nucleotide
  modified_base 17: mod_base = OTHER; note = 2prime-O-methyl Nucleotide
  modified_base 18: mod_base = OTHER; note = 2prime-O-methyl Nucleotide
  modified_base 19: mod_base = OTHER; note = 2prime-O-methyl Nucleotide
  modified_base 20: mod_base = OTHER; note = 2prime-O-methyl Nucleotide
  modified_base 21: mod_base = OTHER; note = 2prime-O-methyl Nucleotide
  modified_base 21..22: mod_base = OTHER; note = Phosphorothioate Linkage
  modified_base 22: mod_base = OTHER; note = 2prime-O-methyl Nucleotide
  modified_base 22..23: mod_base = OTHER; note = Phosphorothioate Linkage
  modified_base 23: mod_base = OTHER; note = 2prime-O-methyl Nucleotide
tccagttccgatttgtaggcctt

SEQ ID NO: 70 - RNA, 23 nt, synthetic construct
  source 1..23: mol_type = other RNA
  modified_base 1: mod_base = OTHER; note = 2prime-O-methyl Nucleotide
  modified_base 1..2: mod_base = OTHER; note = Phosphorothioate Linkage
  modified_base 2: mod_base = OTHER; note = 2prime Fluoro Nucleotide
  modified_base 2..3: mod_base = OTHER; note = Phosphorothioate Linkage
  modified_base 3: mod_base = OTHER; note = 2prime-O-methyl Nucleotide
  modified_base 4: mod_base = OTHER; note = 2prime-O-methyl Nucleotide
  modified_base 5: mod_base = OTHER; note = 2prime-O-methyl Nucleotide
  modified_base 6: mod_base = OTHER; note = 2prime Fluoro Nucleotide
  modified_base 7: mod_base = OTHER; note = 2prime-O-methyl Nucleotide
  modified_base 8: mod_base = OTHER; note = 2prime-O-methyl Nucleotide
  modified_base 9: mod_base = OTHER; note = 2prime-O-methyl Nucleotide
  modified_base 10: mod_base = OTHER; note = 2prime-O-methyl Nucleotide
  modified_base 11: mod_base = OTHER; note = 2prime-O-methyl Nucleotide
  modified_base 12: mod_base = OTHER; note = 2prime-O-methyl Nucleotide
  modified_base 13: mod_base = OTHER; note = 2prime-O-methyl Nucleotide
  modified_base 14: mod_base = OTHER; note = 2prime Fluoro Nucleotide
  modified_base 15: mod_base = OTHER; note = 2prime-O-methyl Nucleotide
  modified_base 16: mod_base = OTHER; note = 2prime Fluoro Nucleotide
  modified_base 17: mod_base = OTHER; note = 2prime-O-methyl Nucleotide
  modified_base 18: mod_base = OTHER; note = 2prime-O-methyl Nucleotide
  modified_base 19: mod_base = OTHER; note = 2prime-O-methyl Nucleotide
  modified_base 20: mod_base = OTHER; note = 2prime-O-methyl Nucleotide
  modified_base 21: mod_base = OTHER; note = 2prime-O-methyl Nucleotide
  modified_base 21..22: mod_base = OTHER; note = Phosphorothioate Linkage
  modified_base 22: mod_base = OTHER; note = 2prime-O-methyl Nucleotide
  modified_base 22..23: mod_base = OTHER; note = Phosphorothioate Linkage
  modified_base 23: mod_base = OTHER; note = 2prime-O-methyl Nucleotide
ttccttcatggtctcgtccatca

SEQ ID NO: 71 - RNA, 23 nt, synthetic construct
  source 1..23: mol_type = other RNA
  modified_base 1: mod_base = OTHER; note = 2prime-O-methyl Nucleotide
  modified_base 1..2: mod_base = OTHER; note = Phosphorothioate Linkage
  modified_base 2: mod_base = OTHER; note = 2prime Fluoro Nucleotide
  modified_base 2..3: mod_base = OTHER; note = Phosphorothioate Linkage
  modified_base 3: mod_base = OTHER; note = 2prime-O-methyl Nucleotide
  modified_base 4: mod_base = OTHER; note = 2prime-O-methyl Nucleotide
  modified_base 5: mod_base = OTHER; note = 2prime Fluoro Nucleotide
  modified_base 6: mod_base = OTHER; note = 2prime-O-methyl Nucleotide
  modified_base 7: mod_base = OTHER; note = 2prime-O-methyl Nucleotide
  modified_base 8: mod_base = OTHER; note = 2prime-O-methyl Nucleotide
  modified_base 9: mod_base = OTHER; note = 2prime-O-methyl Nucleotide
  modified_base 10: mod_base = OTHER; note = 2prime-O-methyl Nucleotide
  modified_base 11: mod_base = OTHER; note = 2prime-O-methyl Nucleotide
  modified_base 12: mod_base = OTHER; note = 2prime-O-methyl Nucleotide
  modified_base 13: mod_base = OTHER; note = 2prime-O-methyl Nucleotide
  modified_base 14: mod_base = OTHER; note = 2prime Fluoro Nucleotide
  modified_base 15: mod_base = OTHER; note = 2prime-O-methyl Nucleotide
  modified_base 16: mod_base = OTHER; note = 2prime Fluoro Nucleotide
  modified_base 17: mod_base = OTHER; note = 2prime-O-methyl Nucleotide
  modified_base 18: mod_base = OTHER; note = 2prime-O-methyl Nucleotide
  modified_base 19: mod_base = OTHER; note = 2prime-O-methyl Nucleotide
  modified_base 20: mod_base = OTHER; note = 2prime-O-methyl Nucleotide
  modified_base 21: mod_base = OTHER; note = 2prime-O-methyl Nucleotide
  modified_base 21..22: mod_base = OTHER; note = Phosphorothioate Linkage
  modified_base 22: mod_base = OTHER; note = 2prime-O-methyl Nucleotide
  modified_base 22..23: mod_base = OTHER; note = Phosphorothioate Linkage
  modified_base 23: mod_base = OTHER; note = 2prime-O-methyl Nucleotide
ttccttcatggtctcgtccatca

SEQ ID NO: 72 - RNA, 23 nt, synthetic construct
  source 1..23: mol_type = other RNA
  modified_base 1: mod_base = OTHER; note = 2prime-O-methyl Nucleotide
  modified_base 1..2: mod_base = OTHER; note = Phosphorothioate Linkage
  modified_base 2: mod_base = OTHER; note = 2prime Fluoro Nucleotide
  modified_base 2..3: mod_base = OTHER; note = Phosphorothioate Linkage
  modified_base 3: mod_base = OTHER; note = 2prime-O-methyl Nucleotide
  modified_base 4: mod_base = OTHER; note = 2prime Fluoro Nucleotide
  modified_base 5: mod_base = OTHER; note = 2prime-O-methyl Nucleotide
  modified_base 6: mod_base = OTHER; note = 2prime-O-methyl Nucleotide
  modified_base 7: mod_base = OTHER; note = 2prime-O-methyl Nucleotide
  modified_base 8: mod_base = OTHER; note = 2prime-O-methyl Nucleotide
  modified_base 9: mod_base = OTHER; note = 2prime-O-methyl Nucleotide
  modified_base 10: mod_base = OTHER; note = 2prime-O-methyl Nucleotide
  modified_base 11: mod_base = OTHER; note = 2prime-O-methyl Nucleotide
  modified_base 12: mod_base = OTHER; note = 2prime-O-methyl Nucleotide
  modified_base 13: mod_base = OTHER; note = 2prime-O-methyl Nucleotide
  modified_base 14: mod_base = OTHER; note = 2prime Fluoro Nucleotide
  modified_base 15: mod_base = OTHER; note = 2prime-O-methyl Nucleotide
  modified_base 16: mod_base = OTHER; note = 2prime Fluoro Nucleotide
  modified_base 17: mod_base = OTHER; note = 2prime-O-methyl Nucleotide
  modified_base 18: mod_base = OTHER; note = 2prime-O-methyl Nucleotide
  modified_base 19: mod_base = OTHER; note = 2prime-O-methyl Nucleotide
  modified_base 20: mod_base = OTHER; note = 2prime-O-methyl Nucleotide
  modified_base 21: mod_base = OTHER; note = 2prime-O-methyl Nucleotide
  modified_base 21..22: mod_base = OTHER; note = Phosphorothioate Linkage
  modified_base 22: mod_base = OTHER; note = 2prime-O-methyl Nucleotide
  modified_base 22..23: mod_base = OTHER; note = Phosphorothioate Linkage
  modified_base 23: mod_base = OTHER; note = 2prime-O-methyl Nucleotide
ttccttcatggtctcgtccatca

SEQ ID NO: 73 - RNA, 23 nt, synthetic construct
  source 1..23: mol_type = other RNA
  modified_base 1: mod_base = OTHER; note = 2prime-O-methyl Nucleotide
  modified_base 1..2: mod_base = OTHER; note = Phosphorothioate Linkage
  modified_base 2: mod_base = OTHER; note = 2prime Fluoro Nucleotide
  modified_base 2..3: mod_base = OTHER; note = Phosphorothioate Linkage
  modified_base 3: mod_base = OTHER; note = 2prime-O-methyl Nucleotide
  modified_base 4: mod_base = OTHER; note = 2prime-O-methyl Nucleotide
  modified_base 5: mod_base = OTHER; note = 2prime-O-methyl Nucleotide
  modified_base 6: mod_base = OTHER; note = 2prime-O-methyl Nucleotide
  modified_base 7: mod_base = OTHER; note = 2prime Fluoro Nucleotide
  modified_base 8: mod_base = OTHER; note = 2prime-O-methyl Nucleotide
  modified_base 9: mod_base = OTHER; note = 2prime-O-methyl Nucleotide
  modified_base 10: mod_base = OTHER; note = 2prime-O-methyl Nucleotide
  modified_base 11: mod_base = OTHER; note = 2prime-O-methyl Nucleotide
  modified_base 12: mod_base = OTHER; note = 2prime-O-methyl Nucleotide
  modified_base 13: mod_base = OTHER; note = 2prime-O-methyl Nucleotide
  modified_base 14: mod_base = OTHER; note = 2prime Fluoro Nucleotide
  modified_base 15: mod_base = OTHER; note = 2prime-O-methyl Nucleotide
  modified_base 16: mod_base = OTHER; note = 2prime Fluoro Nucleotide
  modified_base 17: mod_base = OTHER; note = 2prime-O-methyl Nucleotide
  modified_base 18: mod_base = OTHER; note = 2prime-O-methyl Nucleotide
  modified_base 19: mod_base = OTHER; note = 2prime-O-methyl Nucleotide
  modified_base 20: mod_base = OTHER; note = 2prime-O-methyl Nucleotide
  modified_base 21: mod_base = OTHER; note = 2prime-O-methyl Nucleotide
  modified_base 21..22: mod_base = OTHER; note = Phosphorothioate Linkage
  modified_base 22: mod_base = OTHER; note = 2prime-O-methyl Nucleotide
  modified_base 22..23: mod_base = OTHER; note = Phosphorothioate Linkage
  modified_base 23: mod_base = OTHER; note = 2prime-O-methyl Nucleotide
ttccttcatggtctcgtccatca

SEQ ID NO: 74 - RNA, 23 nt, synthetic construct
  source 1..23: mol_type = other RNA
  modified_base 1: mod_base = OTHER; note = 2prime-O-methyl Nucleotide
  modified_base 1..2: mod_base = OTHER; note = Phosphorothioate Linkage
  modified_base 2: mod_base = OTHER; note = 2prime Fluoro Nucleotide
  modified_base 2..3: mod_base = OTHER; note = Phosphorothioate Linkage
  modified_base 3: mod_base = OTHER; note = 2prime Fluoro Nucleotide
  modified_base 4: mod_base = OTHER; note = 2prime-O-methyl Nucleotide
  modified_base 5: mod_base = OTHER; note = 2prime-O-methyl Nucleotide
  modified_base 6: mod_base = OTHER; note = 2prime-O-methyl Nucleotide
  modified_base 7: mod_base = OTHER; note = 2prime Fluoro Nucleotide
  modified_base 8: mod_base = OTHER; note = 2prime-O-methyl Nucleotide
  modified_base 9: mod_base = OTHER; note = 2prime-O-methyl Nucleotide
  modified_base 10: mod_base = OTHER; note = 2prime-O-methyl Nucleotide
  modified_base 11: mod_base = OTHER; note = 2prime-O-methyl Nucleotide
  modified_base 12: mod_base = OTHER; note = 2prime-O-methyl Nucleotide
  modified_base 13: mod_base = OTHER; note = 2prime-O-methyl Nucleotide
  modified_base 14: mod_base = OTHER; note = 2prime Fluoro Nucleotide
  modified_base 15: mod_base = OTHER; note = 2prime-O-methyl Nucleotide
  modified_base 16: mod_base = OTHER; note = 2prime Fluoro Nucleotide
  modified_base 17: mod_base = OTHER; note = 2prime-O-methyl Nucleotide
  modified_base 18: mod_base = OTHER; note = 2prime-O-methyl Nucleotide
  modified_base 19: mod_base = OTHER; note = 2prime-O-methyl Nucleotide
  modified_base 20: mod_base = OTHER; note = 2prime-O-methyl Nucleotide
  modified_base 21: mod_base = OTHER; note = 2prime-O-methyl Nucleotide
  modified_base 21..22: mod_base = OTHER; note = Phosphorothioate Linkage
  modified_base 22: mod_base = OTHER; note = 2prime-O-methyl Nucleotide
  modified_base 22..23: mod_base = OTHER; note = Phosphorothioate Linkage
  modified_base 23: mod_base = OTHER; note = 2prime-O-methyl Nucleotide
ttccttcatggtctcgtccatca

SEQ ID NO: 75 - RNA, 23 nt, synthetic construct
  source 1..23: mol_type = other RNA
  modified_base 1: mod_base = OTHER; note = 2prime-O-methyl Nucleotide
  modified_base 1..2: mod_base = OTHER; note = Phosphorothioate Linkage
  modified_base 2: mod_base = OTHER; note = 2prime Fluoro Nucleotide
  modified_base 2..3: mod_base = OTHER; note = Phosphorothioate Linkage
  modified_base 3: mod_base = OTHER; note = 2prime-O-methyl Nucleotide
  modified_base 4: mod_base = OTHER; note = 2prime-O-methyl Nucleotide
  modified_base 5: mod_base = OTHER; note = 2prime Fluoro Nucleotide
  modified_base 6: mod_base = OTHER; note = 2prime-O-methyl Nucleotide
  modified_base 7: mod_base = OTHER; note = 2prime Fluoro Nucleotide
  modified_base 8: mod_base = OTHER; note = 2prime-O-methyl Nucleotide
  modified_base 9: mod_base = OTHER; note = 2prime-O-methyl Nucleotide
  modified_base 10: mod_base = OTHER; note = 2prime-O-methyl Nucleotide
  modified_base 11: mod_base = OTHER; note = 2prime-O-methyl Nucleotide
  modified_base 12: mod_base = OTHER; note = 2prime-O-methyl Nucleotide
  modified_base 13: mod_base = OTHER; note = 2prime-O-methyl Nucleotide
  modified_base 14: mod_base = OTHER; note = 2prime Fluoro Nucleotide
  modified_base 15: mod_base = OTHER; note = 2prime-O-methyl Nucleotide
  modified_base 16: mod_base = OTHER; note = 2prime Fluoro Nucleotide
  modified_base 17: mod_base = OTHER; note = 2prime-O-methyl Nucleotide
  modified_base 18: mod_base = OTHER; note = 2prime-O-methyl Nucleotide
  modified_base 19: mod_base = OTHER; note = 2prime-O-methyl Nucleotide
  modified_base 20: mod_base = OTHER; note = 2prime-O-methyl Nucleotide
  modified_base 21: mod_base = OTHER; note = 2prime-O-methyl Nucleotide
  modified_base 21..22: mod_base = OTHER; note = Phosphorothioate Linkage
  modified_base 22: mod_base = OTHER; note = 2prime-O-methyl Nucleotide
  modified_base 22..23: mod_base = OTHER; note = Phosphorothioate Linkage
  modified_base 23: mod_base = OTHER; note = 2prime-O-methyl Nucleotide
ttccttcatggtctcgtccatca

SEQ ID NO: 76 - RNA, 23 nt, synthetic construct
  source 1..23: mol_type = other RNA
  modified_base 1: mod_base = OTHER; note = 2prime-O-methyl Nucleotide
  modified_base 1..2: mod_base = OTHER; note = Phosphorothioate Linkage
  modified_base 2: mod_base = OTHER; note = 2prime Fluoro Nucleotide
  modified_base 2..3: mod_base = OTHER; note = Phosphorothioate Linkage
  modified_base 3: mod_base = OTHER; note = 2prime-O-methyl Nucleotide
  modified_base 4: mod_base = OTHER; note = 2prime-O-methyl Nucleotide
  modified_base 5: mod_base = OTHER; note = 2prime Fluoro Nucleotide
  modified_base 6: mod_base = OTHER; note = 2prime-O-methyl Nucleotide
  modified_base 7: mod_base = OTHER; note = 2prime Fluoro Nucleotide
  modified_base 8: mod_base = OTHER; note = 2prime-O-methyl Nucleotide
  modified_base 9: mod_base = OTHER; note = 2prime-O-methyl Nucleotide
  modified_base 10: mod_base = OTHER; note = 2prime-O-methyl Nucleotide
  modified_base 11: mod_base = OTHER; note = 2prime-O-methyl Nucleotide
  modified_base 12: mod_base = OTHER; note = 2prime-O-methyl Nucleotide
  modified_base 13: mod_base = OTHER; note = 2prime-O-methyl Nucleotide
  modified_base 14: mod_base = OTHER; note = 2prime Fluoro Nucleotide
  modified_base 15: mod_base = OTHER; note = 2prime-O-methyl Nucleotide
  modified_base 16: mod_base = OTHER; note = 2prime Fluoro Nucleotide
  modified_base 17: mod_base = OTHER; note = 2prime-O-methyl Nucleotide
  modified_base 18: mod_base = OTHER; note = 2prime-O-methyl Nucleotide
  modified_base 19: mod_base = OTHER; note = 2prime-O-methyl Nucleotide
  modified_base 20: mod_base = OTHER; note = 2prime-O-methyl Nucleotide
  modified_base 21: mod_base = OTHER; note = 2prime-O-methyl Nucleotide
  modified_base 21..22: mod_base = OTHER; note = Phosphorothioate Linkage
  modified_base 22: mod_base = OTHER; note = 2prime-O-methyl Nucleotide
  modified_base 22..23: mod_base = OTHER; note = Phosphorothioate Linkage
  modified_base 23: mod_base = OTHER; note = 2prime-O-methyl Nucleotide
ttccttcatggtctcgtccatca

SEQ ID NO: 77 - RNA, 21 nt, synthetic construct
  source 1..21: mol_type = other RNA
ctgtacaagtgctcagttcca

SEQ ID NO: 78 - RNA, 23 nt, synthetic construct
  source 1..23: mol_type = other RNA
tggaactgagcacttgtacagga

SEQ ID NO: 79 - RNA, 21 nt, synthetic construct
  source 1..21: mol_type = other RNA
  modified_base 1: mod_base = OTHER; note = 2prime-O-methyl Nucleotide
  modified_base 1..2: mod_base = OTHER; note = Phosphorothioate Linkage
  modified_base 2: mod_base = OTHER; note = 2prime-O-methyl Nucleotide
  modified_base 2..3: mod_base = OTHER; note = Phosphorothioate Linkage
  modified_base 3: mod_base = OTHER; note = 2prime-O-methyl Nucleotide
  modified_base 4: mod_base = OTHER; note = 2prime-O-methyl Nucleotide
  modified_base 5: mod_base = OTHER; note = 2prime-O-methyl Nucleotide
  modified_base 6: mod_base = OTHER; note = 2prime-O-methyl Nucleotide
  modified_base 7: mod_base = OTHER; note = 2prime Fluoro Nucleotide
  modified_base 8: mod_base = OTHER; note = 2prime-O-methyl Nucleotide
  modified_base 9: mod_base = OTHER; note = 2prime Fluoro Nucleotide
  modified_base 10: mod_base = OTHER; note = abasic moiety
  modified_base 11: mod_base = OTHER; note = 2prime Fluoro Nucleotide
  modified_base 12: mod_base = OTHER; note = 2prime-O-methyl Nucleotide
  modified_base 13: mod_base = OTHER; note = 2prime-O-methyl Nucleotide
  modified_base 14: mod_base = OTHER; note = 2prime-O-methyl Nucleotide
  modified_base 15: mod_base = OTHER; note = 2prime-O-methyl Nucleotide
  modified_base 16: mod_base = OTHER; note = 2prime-O-methyl Nucleotide
  modified_base 17: mod_base = OTHER; note = 2prime-O-methyl Nucleotide
  modified_base 18: mod_base = OTHER; note = 2prime-O-methyl Nucleotide
  modified_base 20..21: mod_base = OTHER; note = Phosphorothioate Linkage
  modified_base 19: mod_base = OTHER; note = 2prime-O-methyl Nucleotide
  modified_base 19..20: mod_base = OTHER; note = Phosphorothioate Linkage
  modified_base 20: mod_base = OTHER; note = 2prime-O-methyl Nucleotide
  modified_base 21: mod_base = OTHER; note = 2prime-O-methyl Nucleotide
ctgtacaagngctcagttcca

SEQ ID NO: 80 - RNA, 21 nt, synthetic construct
  source 1..21: mol_type = other RNA
  modified_base 1: mod_base = OTHER; note = 2prime-O-methyl Nucleotide
  modified_base 1..2: mod_base = OTHER; note = Phosphorothioate Linkage
  modified_base 2: mod_base = OTHER; note = 2prime-O-methyl Nucleotide
  modified_base 2..3: mod_base = OTHER; note = Phosphorothioate Linkage
  modified_base 3: mod_base = OTHER; note = 2prime-O-methyl Nucleotide
  modified_base 4: mod_base = OTHER; note = 2prime-O-methyl Nucleotide
  modified_base 5: mod_base = OTHER; note = 2prime-O-methyl Nucleotide
  modified_base 6: mod_base = OTHER; note = 2prime-O-methyl Nucleotide
  modified_base 7: mod_base = OTHER; note = 2prime Fluoro Nucleotide
  modified_base 8: mod_base = OTHER; note = 2prime-O-methyl Nucleotide
  modified_base 10: mod_base = OTHER; note = abasic moiety
  modified_base 11: mod_base = OTHER; note = 2prime-O-methyl Nucleotide
  modified_base 12: mod_base = OTHER; note = 2prime-O-methyl Nucleotide
  modified_base 13: mod_base = OTHER; note = 2prime-O-methyl Nucleotide
  modified_base 14: mod_base = OTHER; note = 2prime-O-methyl Nucleotide
  modified_base 15: mod_base = OTHER; note = 2prime-O-methyl Nucleotide
  modified_base 16: mod_base = OTHER; note = 2prime-O-methyl Nucleotide
  modified_base 17: mod_base = OTHER; note = 2prime-O-methyl Nucleotide
  modified_base 18: mod_base = OTHER; note = 2prime-O-methyl Nucleotide
  modified_base 20..21: mod_base = OTHER; note = Phosphorothioate Linkage
  modified_base 19: mod_base = OTHER; note = 2prime-O-methyl Nucleotide
  modified_base 19..20: mod_base = OTHER; note = Phosphorothioate Linkage
  modified_base 20: mod_base = OTHER; note = 2prime-O-methyl Nucleotide
ctgtacaagngctcagttcca

SEQ ID NO: 81 - RNA, 21 nt, synthetic construct
  source 1..21: mol_type = other RNA
  modified_base 1: mod_base = OTHER; note = 2prime-O-methyl Nucleotide
  modified_base 1..2: mod_base = OTHER; note = Phosphorothioate Linkage
  modified_base 2: mod_base = OTHER; note = 2prime-O-methyl Nucleotide
  modified_base 2..3: mod_base = OTHER; note = Phosphorothioate Linkage
  modified_base 3: mod_base = OTHER; note = 2prime-O-methyl Nucleotide
  modified_base 4: mod_base = OTHER; note = 2prime-O-methyl Nucleotide
  modified_base 5: mod_base = OTHER; note = 2prime-O-methyl Nucleotide
  modified_base 6: mod_base = OTHER; note = 2prime-O-methyl Nucleotide
  modified_base 7: mod_base = OTHER; note = 2prime Fluoro Nucleotide
  modified_base 8: mod_base = OTHER; note = 2prime-O-methyl Nucleotide
  modified_base 9: mod_base = OTHER; note = 2prime Fluoro Nucleotide
  modified_base 10: mod_base = OTHER; note = abasic moiety
  modified_base 11: mod_base = OTHER; note = 2prime Fluoro Nucleotide
  modified_base 12: mod_base = OTHER; note = 2prime-O-methyl Nucleotide
  modified_base 13: mod_base = OTHER; note = 2prime-O-methyl Nucleotide
  modified_base 14: mod_base = OTHER; note = 2prime-O-methyl Nucleotide
  modified_base 15: mod_base = OTHER; note = 2prime-O-methyl Nucleotide
  modified_base 16: mod_base = OTHER; note = 2prime-O-methyl Nucleotide
  modified_base 17: mod_base = OTHER; note = 2prime-O-methyl Nucleotide
  modified_base 18: mod_base = OTHER; note = 2prime-O-methyl Nucleotide
  modified_base 20..21: mod_base = OTHER; note = Phosphorothioate Linkage
  modified_base 19: mod_base = OTHER; note = 2prime-O-methyl Nucleotide
  modified_base 19..20: mod_base = OTHER; note = Phosphorothioate Linkage
  modified_base 20: mod_base = OTHER; note = 2prime-O-methyl Nucleotide
  modified_base 21: mod_base = OTHER; note = 2prime-O-methyl Nucleotide
ctgtacaagngctcagttcca

SEQ ID NO: 82 - RNA, 21 nt, synthetic construct
  source 1..21: mol_type = other RNA
  modified_base 1: mod_base = OTHER; note = 2prime-O-methyl Nucleotide
  modified_base 1..2: mod_base = OTHER; note = Phosphorothioate Linkage
  modified_base 2: mod_base = OTHER; note = 2prime-O-methyl Nucleotide
  modified_base 2..3: mod_base = OTHER; note = Phosphorothioate Linkage
  modified_base 3: mod_base = OTHER; note = 2prime-O-methyl Nucleotide
  modified_base 4: mod_base = OTHER; note = 2prime-O-methyl Nucleotide
  modified_base 5: mod_base = OTHER; note = 2prime-O-methyl Nucleotide
  modified_base 6: mod_base = OTHER; note = 2prime-O-methyl Nucleotide
  modified_base 7: mod_base = OTHER; note = 2prime Fluoro Nucleotide
  modified_base 8: mod_base = OTHER; note = 2prime-O-methyl Nucleotide
  modified_base 9: mod_base = OTHER; note = 2prime Fluoro Nucleotide
  modified_base 10: mod_base = OTHER; note = 2prime Fluoro Nucleotide
  modified_base 11: mod_base = OTHER; note = 2prime Fluoro Nucleotide
  modified_base 12: mod_base = OTHER; note = 2prime-O-methyl Nucleotide
  modified_base 13: mod_base = OTHER; note = 2prime-O-methyl Nucleotide
  modified_base 14: mod_base = OTHER; note = 2prime-O-methyl Nucleotide
  modified_base 15: mod_base = OTHER; note = 2prime-O-methyl Nucleotide
  modified_base 16: mod_base = OTHER; note = 2prime-O-methyl Nucleotide
  modified_base 17: mod_base = OTHER; note = 2prime-O-methyl Nucleotide
  modified_base 18: mod_base = OTHER; note = 2prime-O-methyl Nucleotide
  modified_base 19: mod_base = OTHER; note = 2prime-O-methyl Nucleotide
  modified_base 19..20: mod_base = OTHER; note = Phosphorothioate Linkage
  modified_base 20: mod_base = OTHER; note = 2prime-O-methyl Nucleotide
  modified_base 20..21: mod_base = OTHER; note = Phosphorothioate Linkage
  modified_base 21: mod_base = OTHER; note = 2prime-O-methyl Nucleotide
ctgtacaagtgctcagttcca

SEQ ID NO: 83 - RNA, 21 nt, synthetic construct
  source 1..21: mol_type = other RNA
  modified_base 1: mod_base = OTHER; note = 2prime-O-methyl Nucleotide
  modified_base 1..2: mod_base = OTHER; note = Phosphorothioate Linkage
  modified_base 2: mod_base = OTHER; note = 2prime-O-methyl Nucleotide
  modified_base 2..3: mod_base = OTHER; note = Phosphorothioate Linkage
  modified_base 3: mod_base = OTHER; note = 2prime-O-methyl Nucleotide
  modified_base 4: mod_base = OTHER; note = 2prime-O-methyl Nucleotide
  modified_base 5: mod_base = OTHER; note = 2prime-O-methyl Nucleotide
  modified_base 6: mod_base = OTHER; note = 2prime-O-methyl Nucleotide
  modified_base 7: mod_base = OTHER; note = 2prime Fluoro Nucleotide
  modified_base 8: mod_base = OTHER; note = 2prime-O-methyl Nucleotide
  modified_base 9: mod_base = OTHER; note = 2prime Fluoro Nucleotide
  modified_base 10: mod_base = OTHER; note = 2prime Fluoro Nucleotide
  modified_base 11: mod_base = OTHER; note = 2prime Fluoro Nucleotide
  modified_base 12: mod_base = OTHER; note = 2prime-O-methyl Nucleotide
  modified_base 13: mod_base = OTHER; note = 2prime-O-methyl Nucleotide
  modified_base 14: mod_base = OTHER; note = 2prime-O-methyl Nucleotide
  modified_base 15: mod_base = OTHER; note = 2prime-O-methyl Nucleotide
  modified_base 16: mod_base = OTHER; note = 2prime-O-methyl Nucleotide
  modified_base 17: mod_base = OTHER; note = 2prime-O-methyl Nucleotide
  modified_base 18: mod_base = OTHER; note = 2prime-O-methyl Nucleotide
  modified_base 19: mod_base = OTHER; note = 2prime-O-methyl Nucleotide
  modified_base 19..20: mod_base = OTHER; note = Phosphorothioate Linkage
  modified_base 20: mod_base = OTHER; note = 2prime-O-methyl Nucleotide
  modified_base 20..21: mod_base = OTHER; note = Phosphorothioate Linkage
  modified_base 21: mod_base = OTHER; note = 2prime-O-methyl Nucleotide
ctgtacaagtgctcagttcca

SEQ ID NO: 84 - RNA, 21 nt, synthetic construct
  source 1..21: mol_type = other RNA
  modified_base 1: mod_base = OTHER; note = 2prime-O-methyl Nucleotide
  modified_base 1..2: mod_base = OTHER; note = Phosphorothioate Linkage
  modified_base 2: mod_base = OTHER; note = 2prime-O-methyl Nucleotide
  modified_base 2..3: mod_base = OTHER; note = Phosphorothioate Linkage
  modified_base 3: mod_base = OTHER; note = 2prime-O-methyl Nucleotide
  modified_base 4: mod_base = OTHER; note = 2prime-O-methyl Nucleotide
  modified_base 5: mod_base = OTHER; note = 2prime-O-methyl Nucleotide
  modified_base 6: mod_base = OTHER; note = 2prime-O-methyl Nucleotide
  modified_base 7: mod_base = OTHER; note = 2prime Fluoro Nucleotide
  modified_base 8: mod_base = OTHER; note = 2prime-O-methyl Nucleotide
  modified_base 9: mod_base = OTHER; note = 2prime Fluoro Nucleotide
  modified_base 10: mod_base = OTHER; note = 2prime Fluoro Nucleotide
  modified_base 11: mod_base = OTHER; note = 2prime Fluoro Nucleotide
  modified_base 12: mod_base = OTHER; note = 2prime-O-methyl Nucleotide
  modified_base 13: mod_base = OTHER; note = 2prime-O-methyl Nucleotide
  modified_base 14: mod_base = OTHER; note = 2prime-O-methyl Nucleotide
  modified_base 15: mod_base = OTHER; note = 2prime-O-methyl Nucleotide
  modified_base 16: mod_base = OTHER; note = 2prime-O-methyl Nucleotide
  modified_base 17: mod_base = OTHER; note = 2prime-O-methyl Nucleotide
  modified_base 18: mod_base = OTHER; note = 2prime-O-methyl Nucleotide
  modified_base 19: mod_base = OTHER; note = 2prime-O-methyl Nucleotide
  modified_base 19..20: mod_base = OTHER; note = Phosphorothioate Linkage
  modified_base 20: mod_base = OTHER; note = 2prime-O-methyl Nucleotide
  modified_base 20..21: mod_base = OTHER; note = Phosphorothioate Linkage
  modified_base 21: mod_base = OTHER; note = 2prime-O-methyl Nucleotide
ctgtacaagtgctcagttcca

SEQ ID NO: 85 - RNA, 21 nt, synthetic construct
  source 1..21: mol_type = other RNA
  modified_base 1: mod_base = OTHER; note = 2prime-O-methyl Nucleotide
  modified_base 1..2: mod_base = OTHER; note = Phosphorothioate Linkage
  modified_base 2: mod_base = OTHER; note = 2prime-O-methyl Nucleotide
  modified_base 2..3: mod_base = OTHER; note = Phosphorothioate Linkage
  modified_base 3: mod_base = OTHER; note = 2prime-O-methyl Nucleotide
  modified_base 4: mod_base = OTHER; note = 2prime-O-methyl Nucleotide
  modified_base 5: mod_base = OTHER; note = 2prime-O-methyl Nucleotide
  modified_base 6: mod_base = OTHER; note = 2prime-O-methyl Nucleotide
  modified_base 7: mod_base = OTHER; note = 2prime Fluoro Nucleotide
  modified_base 8: mod_base = OTHER; note = 2prime-O-methyl Nucleotide
  modified_base 9: mod_base = OTHER; note = 2prime Fluoro Nucleotide
  modified_base 10: mod_base = OTHER; note = 2prime Fluoro Nucleotide
  modified_base 11: mod_base = OTHER; note = 2prime Fluoro Nucleotide
  modified_base 12: mod_base = OTHER; note = 2prime-O-methyl Nucleotide
  modified_base 13: mod_base = OTHER; note = 2prime-O-methyl Nucleotide
  modified_base 14: mod_base = OTHER; note = 2prime-O-methyl Nucleotide
  modified_base 15: mod_base = OTHER; note = 2prime-O-methyl Nucleotide
  modified_base 16: mod_base = OTHER; note = 2prime-O-methyl Nucleotide
  modified_base 17: mod_base = OTHER; note = 2prime-O-methyl Nucleotide
  modified_base 18: mod_base = OTHER; note = 2prime-O-methyl Nucleotide
  modified_base 19: mod_base = OTHER; note = 2prime-O-methyl Nucleotide
  modified_base 19..20: mod_base = OTHER; note = Phosphorothioate Linkage
  modified_base 20: mod_base = OTHER; note = 2prime-O-methyl Nucleotide
  modified_base 20..21: mod_base = OTHER; note = Phosphorothioate Linkage
  modified_base 21: mod_base = OTHER; note = 2prime-O-methyl Nucleotide
ctgtacaagtgctcagttcca

SEQ ID NO: 86 - RNA, 21 nt, synthetic construct
  source 1..21: mol_type = other RNA
  modified_base 1: mod_base = OTHER; note = 2prime-O-methyl Nucleotide
  modified_base 1..2: mod_base = OTHER; note = Phosphorothioate Linkage
  modified_base 2: mod_base = OTHER; note = 2prime-O-methyl Nucleotide
  modified_base 2..3: mod_base = OTHER; note = Phosphorothioate Linkage
  modified_base 3: mod_base = OTHER; note = 2prime-O-methyl Nucleotide
  modified_base 4: mod_base = OTHER; note = 2prime-O-methyl Nucleotide
  modified_base 5: mod_base = OTHER; note = 2prime-O-methyl Nucleotide
  modified_base 6: mod_base = OTHER; note = 2prime-O-methyl Nucleotide
  modified_base 7: mod_base = OTHER; note = 2prime Fluoro Nucleotide
  modified_base 8: mod_base = OTHER; note = 2prime-O-methyl Nucleotide
  modified_base 9: mod_base = OTHER; note = 2prime Fluoro Nucleotide
  modified_base 10: mod_base = OTHER; note = 2prime Fluoro Nucleotide
  modified_base 11: mod_base = OTHER; note = 2prime Fluoro Nucleotide
  modified_base 12: mod_base = OTHER; note = 2prime-O-methyl Nucleotide
  modified_base 13: mod_base = OTHER; note = 2prime-O-methyl Nucleotide
  modified_base 14: mod_base = OTHER; note = 2prime-O-methyl Nucleotide
  modified_base 15: mod_base = OTHER; note = 2prime-O-methyl Nucleotide
  modified_base 16: mod_base = OTHER; note = 2prime-O-methyl Nucleotide
  modified_base 17: mod_base = OTHER; note = 2prime-O-methyl Nucleotide
  modified_base 18: mod_base = OTHER; note = 2prime-O-methyl Nucleotide
  modified_base 19: mod_base = OTHER; note = 2prime-O-methyl Nucleotide
  modified_base 19..20: mod_base = OTHER; note = Phosphorothioate Linkage
  modified_base 20: mod_base = OTHER; note = 2prime-O-methyl Nucleotide
  modified_base 20..21: mod_base = OTHER; note = Phosphorothioate Linkage
  modified_base 21: mod_base = OTHER; note = 2prime-O-methyl Nucleotide
ctgtacaagtgctcagttcca

SEQ ID NO: 87 - RNA, 21 nt, synthetic construct
  source 1..21: mol_type = other RNA
  modified_base 1: mod_base = OTHER; note = 2prime-O-methyl Nucleotide
  modified_base 1..2: mod_base = OTHER; note = Phosphorothioate Linkage
  modified_base 2: mod_base = OTHER; note = 2prime-O-methyl Nucleotide
  modified_base 2..3: mod_base = OTHER; note = Phosphorothioate Linkage
  modified_base 3: mod_base = OTHER; note = 2prime-O-methyl Nucleotide
  modified_base 4: mod_base = OTHER; note = 2prime-O-methyl Nucleotide
  modified_base 5: mod_base = OTHER; note = 2prime-O-methyl Nucleotide
  modified_base 6: mod_base = OTHER; note = 2prime-O-methyl Nucleotide
  modified_base 7: mod_base = OTHER; note = 2prime Fluoro Nucleotide
  modified_base 8: mod_base = OTHER; note = 2prime-O-methyl Nucleotide
  modified_base 9: mod_base = OTHER; note = 2prime Fluoro Nucleotide
  modified_base 11: mod_base = OTHER; note = 2prime Fluoro Nucleotide
  modified_base 12: mod_base = OTHER; note = 2prime-O-methyl Nucleotide
  modified_base 13: mod_base = OTHER; note = 2prime-O-methyl Nucleotide
  modified_base 14: mod_base = OTHER; note = 2prime-O-methyl Nucleotide
  modified_base 15: mod_base = OTHER; note = 2prime-O-methyl Nucleotide
  modified_base 16: mod_base = OTHER; note = 2prime-O-methyl Nucleotide
  modified_base 17: mod_base = OTHER; note = 2prime-O-methyl Nucleotide
  modified_base 18: mod_base = OTHER; note = 2prime-O-methyl Nucleotide
  modified_base 19: mod_base = OTHER; note = 2prime-O-methyl Nucleotide
  modified_base 19..20: mod_base = OTHER; note = Phosphorothioate Linkage
  modified_base 20: mod_base = OTHER; note = 2prime-O-methyl Nucleotide
  modified_base 20..21: mod_base = OTHER; note = Phosphorothioate Linkage
  modified_base 21: mod_base = OTHER; note = 2prime-O-methyl Nucleotide
ctgtacaagtgctcagttcca

SEQ ID NO: 88 - RNA, 21 nt, synthetic construct
  source 1..21: mol_type = other RNA
  modified_base 1: mod_base = OTHER; note = 2prime-O-methyl Nucleotide
  modified_base 1..2: mod_base = OTHER; note = Phosphorothioate Linkage
  modified_base 2: mod_base = OTHER; note = 2prime-O-methyl Nucleotide
  modified_base 2..3: mod_base = OTHER; note = Phosphorothioate Linkage
  modified_base 3: mod_base = OTHER; note = 2prime-O-methyl Nucleotide
  modified_base 4: mod_base = OTHER; note = 2prime-O-methyl Nucleotide
  modified_base 5: mod_base = OTHER; note = 2prime-O-methyl Nucleotide
  modified_base 6: mod_base = OTHER; note = 2prime-O-methyl Nucleotide
  modified_base 8: mod_base = OTHER; note = 2prime-O-methyl Nucleotide
  modified_base 9: mod_base = OTHER; note = 2prime Fluoro Nucleotide
  modified_base 10: mod_base = OTHER; note = 2prime Fluoro Nucleotide
  modified_base 11: mod_base = OTHER; note = 2prime Fluoro Nucleotide
  modified_base 12: mod_base = OTHER; note = 2prime-O-methyl Nucleotide
  modified_base 13: mod_base = OTHER; note = 2prime-O-methyl Nucleotide
  modified_base 14: mod_base = OTHER; note = 2prime-O-methyl Nucleotide
  modified_base 15: mod_base = OTHER; note = 2prime-O-methyl Nucleotide
  modified_base 16: mod_base = OTHER; note = 2prime-O-methyl Nucleotide
  modified_base 17: mod_base = OTHER; note = 2prime-O-methyl Nucleotide
  modified_base 18: mod_base = OTHER; note = 2prime-O-methyl Nucleotide
  modified_base 19: mod_base = OTHER; note = 2prime-O-methyl Nucleotide
  modified_base 19..20: mod_base = OTHER; note = Phosphorothioate Linkage
  modified_base 20: mod_base = OTHER; note = 2prime-O-methyl Nucleotide
  modified_base 20..21: mod_base = OTHER; note = Phosphorothioate Linkage
  modified_base 21: mod_base = OTHER; note = 2prime-O-methyl Nucleotide
ctgtacaagtgctcagttcca

SEQ ID NO: 89 - RNA, 21 nt, synthetic construct
  source 1..21: mol_type = other RNA
  modified_base 1: mod_base = OTHER; note = 2prime-O-methyl Nucleotide
  modified_base 1..2: mod_base = OTHER; note = Phosphorothioate Linkage
  modified_base 2: mod_base = OTHER; note = 2prime-O-methyl Nucleotide
  modified_base 2..3: mod_base = OTHER; note = Phosphorothioate Linkage
  modified_base 3: mod_base = OTHER; note = 2prime-O-methyl Nucleotide
  modified_base 4: mod_base = OTHER; note = 2prime-O-methyl Nucleotide
  modified_base 5: mod_base = OTHER; note = 2prime-O-methyl Nucleotide
  modified_base 6: mod_base = OTHER; note = 2prime-O-methyl Nucleotide
  modified_base 7: mod_base = OTHER; note = 2prime Fluoro Nucleotide
  modified_base 8: mod_base = OTHER; note = 2prime-O-methyl Nucleotide
  modified_base 9: mod_base = OTHER; note = 2prime Fluoro Nucleotide
  modified_base 10: mod_base = OTHER; note = 2prime Fluoro Nucleotide
  modified_base 11: mod_base = OTHER; note = 2prime Fluoro Nucleotide
  modified_base 12: mod_base = OTHER; note = 2prime-O-methyl Nucleotide
  modified_base 13: mod_base = OTHER; note = 2prime-O-methyl Nucleotide
  modified_base 14: mod_base = OTHER; note = 2prime-O-methyl Nucleotide
  modified_base 15: mod_base = OTHER; note = 2prime-O-methyl Nucleotide
  modified_base 16: mod_base = OTHER; note = 2prime-O-methyl Nucleotide
  modified_base 17: mod_base = OTHER; note = 2prime-O-methyl Nucleotide
  modified_base 18: mod_base = OTHER; note = 2prime-O-methyl Nucleotide
  modified_base 19: mod_base = OTHER; note = 2prime-O-methyl Nucleotide
  modified_base 19..20: mod_base = OTHER; note = Phosphorothioate Linkage
  modified_base 20: mod_base = OTHER; note = 2prime-O-methyl Nucleotide
  modified_base 20..21: mod_base = OTHER; note = Phosphorothioate Linkage
  modified_base 21: mod_base = OTHER; note = 2prime-O-methyl Nucleotide
ctgtacaagtgctcagttccg

SEQ ID NO: 90 - RNA, 21 nt, synthetic construct
  source 1..21: mol_type = other RNA
  modified_base 1: mod_base = OTHER; note = 2prime-O-methyl Nucleotide
  modified_base 1..2: mod_base = OTHER; note = Phosphorothioate Linkage
  modified_base 2: mod_base = OTHER; note = 2prime-O-methyl Nucleotide
  modified_base 2..3: mod_base = OTHER; note = Phosphorothioate Linkage
  modified_base 3: mod_base = OTHER; note = 2prime-O-methyl Nucleotide
  modified_base 4: mod_base = OTHER; note = 2prime-O-methyl Nucleotide
  modified_base 5: mod_base = OTHER; note = 2prime-O-methyl Nucleotide
  modified_base 6: mod_base = OTHER; note = 2prime-O-methyl Nucleotide
  modified_base 7: mod_base = OTHER; note = 2prime Fluoro Nucleotide
  modified_base 8: mod_base = OTHER; note = 2prime-O-methyl Nucleotide
  modified_base 9: mod_base = OTHER; note = 2prime Fluoro Nucleotide
  modified_base 10: mod_base = OTHER; note = 2prime Fluoro Nucleotide
  modified_base 11: mod_base = OTHER; note = 2prime Fluoro Nucleotide
  modified_base 12: mod_base = OTHER; note = 2prime-O-methyl Nucleotide
  modified_base 13: mod_base = OTHER; note = 2prime-O-methyl Nucleotide
  modified_base 14: mod_base = OTHER; note = 2prime-O-methyl Nucleotide
  modified_base 15: mod_base = OTHER; note = 2prime-O-methyl Nucleotide
  modified_base 16: mod_base = OTHER; note = 2prime-O-methyl Nucleotide
  modified_base 17: mod_base = OTHER; note = 2prime-O-methyl Nucleotide
  modified_base 18: mod_base = OTHER; note = 2prime-O-methyl Nucleotide
  modified_base 19: mod_base = OTHER; note = 2prime-O-methyl Nucleotide
  modified_base 19..20: mod_base = OTHER; note = Phosphorothioate Linkage
  modified_base 20: mod_base = OTHER; note = 2prime-O-methyl Nucleotide
  modified_base 20..21: mod_base = OTHER; note = Phosphorothioate Linkage
  modified_base 21: mod_base = OTHER; note = 2prime-O-methyl Nucleotide
ctgtacaagtgctcagttcca

SEQ ID NO: 91 - RNA, 21 nt, synthetic construct
  source 1..21: mol_type = other RNA
  modified_base 1: mod_base = OTHER; note = 2prime-O-methyl Nucleotide
  modified_base 1..2: mod_base = OTHER; note = Phosphorothioate Linkage
  modified_base 2: mod_base = OTHER; note = 2prime-O-methyl Nucleotide
  modified_base 2..3: mod_base = OTHER; note = Phosphorothioate Linkage
  modified_base 3: mod_base = OTHER; note = 2prime-O-methyl Nucleotide
  modified_base 4: mod_base = OTHER; note = 2prime-O-methyl Nucleotide
  modified_base 5: mod_base = OTHER; note = 2prime-O-methyl Nucleotide
  modified_base 6: mod_base = OTHER; note = 2prime-O-methyl Nucleotide
  modified_base 7: mod_base = OTHER; note = 2prime-O-methyl Nucleotide
  modified_base 8: mod_base = OTHER; note = 2prime-O-methyl Nucleotide
  modified_base 9: mod_base = OTHER; note = 2prime Fluoro Nucleotide
  modified_base 10: mod_base = OTHER; note = 2prime Fluoro Nucleotide
  modified_base 11: mod_base = OTHER; note = 2prime Fluoro Nucleotide
  modified_base 12: mod_base = OTHER; note = 2prime-O-methyl Nucleotide
  modified_base 13: mod_base = OTHER; note = 2prime-O-methyl Nucleotide
  modified_base 14: mod_base = OTHER; note = 2prime-O-methyl Nucleotide
  modified_base 15: mod_base = OTHER; note = 2prime-O-methyl Nucleotide
  modified_base 16: mod_base = OTHER; note = 2prime-O-methyl Nucleotide
  modified_base 17: mod_base = OTHER; note = 2prime-O-methyl Nucleotide
  modified_base 18: mod_base = OTHER; note = 2prime-O-methyl Nucleotide
  modified_base 19: mod_base = OTHER; note = 2prime-O-methyl Nucleotide
  modified_base 19..20: mod_base = OTHER; note = Phosphorothioate Linkage
  modified_base 20: mod_base = OTHER; note = 2prime-O-methyl Nucleotide
  modified_base 20..21: mod_base = OTHER; note = Phosphorothioate Linkage
  modified_base 21: mod_base = OTHER; note = 2prime-O-methyl Nucleotide
ctgtacaagtgctcagttcca

SEQ ID NO: 92 - RNA, 21 nt, synthetic construct
  source 1..21: mol_type = other RNA
  modified_base 1: mod_base = OTHER; note = 2prime Fluoro Nucleotide
  modified_base 1..2: mod_base = OTHER; note = Phosphorothioate Linkage
  modified_base 2: mod_base = OTHER; note = 2prime-O-methyl Nucleotide
  modified_base 2..3: mod_base = OTHER; note = Phosphorothioate Linkage
  modified_base 3: mod_base = OTHER; note = 2prime Fluoro Nucleotide
  modified_base 4: mod_base = OTHER; note = 2prime-O-methyl Nucleotide
  modified_base 5: mod_base = OTHER; note = 2prime Fluoro Nucleotide
  modified_base 6: mod_base = OTHER; note = 2prime-O-methyl Nucleotide
  modified_base 7: mod_base = OTHER; note = 2prime Fluoro Nucleotide
  modified_base 8: mod_base = OTHER; note = 2prime-O-methyl Nucleotide
  modified_base 9: mod_base = OTHER; note = 2prime Fluoro Nucleotide
  modified_base 10: mod_base = OTHER; note = 2prime Fluoro Nucleotide
  modified_base 11: mod_base = OTHER; note = 2prime Fluoro Nucleotide
  modified_base 12: mod_base = OTHER; note = 2prime-O-methyl Nucleotide
  modified_base 13: mod_base = OTHER; note = 2prime Fluoro Nucleotide
  modified_base 14: mod_base = OTHER; note = 2prime-O-methyl Nucleotide
  modified_base 15: mod_base = OTHER; note = 2prime Fluoro Nucleotide
  modified_base 16: mod_base = OTHER; note = 2prime-O-methyl Nucleotide
  modified_base 17: mod_base = OTHER; note = 2prime Fluoro Nucleotide
  modified_base 18: mod_base = OTHER; note = 2prime-O-methyl Nucleotide
  modified_base 19: mod_base = OTHER; note = 2prime Fluoro Nucleotide
  modified_base 19..20: mod_base = OTHER; note = Phosphorothioate Linkage
  modified_base 20: mod_base = OTHER; note = 2prime-O-methyl Nucleotide
  modified_base 20..21: mod_base = OTHER; note = Phosphorothioate Linkage
  modified_base 21: mod_base = OTHER; note = 2prime Fluoro Nucleotide
ctgtacaagtgctcagttcca

SEQ ID NO: 93 - RNA, 21 nt, synthetic construct
  source 1..21: mol_type = other RNA
  modified_base 1: mod_base = OTHER; note = 2prime-O-methyl Nucleotide
  modified_base 1..2: mod_base = OTHER; note = Phosphorothioate Linkage
  modified_base 2: mod_base = OTHER; note = 2prime-O-methyl Nucleotide
  modified_base 2..3: mod_base = OTHER; note = Phosphorothioate Linkage
  modified_base 3: mod_base = OTHER; note = 2prime-O-methyl Nucleotide
  modified_base 4: mod_base = OTHER; note = 2prime-O-methyl Nucleotide
  modified_base 5: mod_base = OTHER; note = 2prime-O-methyl Nucleotide
  modified_base 6: mod_base = OTHER; note = 2prime-O-methyl Nucleotide
  modified_base 7: mod_base = OTHER; note = 2prime Fluoro Nucleotide
  modified_base 8: mod_base = OTHER; note = 2prime-O-methyl Nucleotide
  modified_base 9: mod_base = OTHER; note = 2prime Fluoro Nucleotide
  modified_base 10: mod_base = OTHER; note = 2prime Fluoro Nucleotide
  modified_base 11: mod_base = OTHER; note = 2prime Fluoro Nucleotide
  modified_base 12: mod_base = OTHER; note = 2prime-O-methyl Nucleotide
  modified_base 13: mod_base = OTHER; note = 2prime-O-methyl Nucleotide
  modified_base 14: mod_base = OTHER; note = 2prime-O-methyl Nucleotide
  modified_base 15: mod_base = OTHER; note = 2prime-O-methyl Nucleotide
  modified_base 16: mod_base = OTHER; note = 2prime-O-methyl Nucleotide
  modified_base 17: mod_base = OTHER; note = 2prime-O-methyl Nucleotide
  modified_base 18: mod_base = OTHER; note = 2prime-O-methyl Nucleotide
  modified_base 19: mod_base = OTHER; note = 2prime-O-methyl Nucleotide
  modified_base 19..20: mod_base = OTHER; note = Phosphorothioate Linkage
  modified_base 20: mod_base = OTHER; note = 2prime-O-methyl Nucleotide
  modified_base 20..21: mod_base = OTHER; note = Phosphorothioate Linkage
  modified_base 21: mod_base = OTHER; note = 2prime-O-methyl Nucleotide
ctgtacaagtgctcagttcca

SEQ ID NO: 94 - RNA, 21 nt, synthetic construct
  source 1..21: mol_type = other RNA
  modified_base 1: mod_base = OTHER; note = 2prime-O-methyl Nucleotide
  modified_base 1..2: mod_base = OTHER; note = Phosphorothioate Linkage
  modified_base 2: mod_base = OTHER; note = 2prime-O-methyl Nucleotide
  modified_base 2..3: mod_base = OTHER; note = Phosphorothioate Linkage
  modified_base 3: mod_base = OTHER; note = 2prime-O-methyl Nucleotide
  modified_base 4: mod_base = OTHER; note = 2prime-O-methyl Nucleotide
  modified_base 5: mod_base = OTHER; note = 2prime-O-methyl Nucleotide
  modified_base 6: mod_base = OTHER; note = 2prime-O-methyl Nucleotide
  modified_base 7: mod_base = OTHER; note = 2prime Fluoro Nucleotide
  modified_base 8: mod_base = OTHER; note = 2prime-O-methyl Nucleotide
  modified_base 9: mod_base = OTHER; note = 2prime Fluoro Nucleotide
  modified_base 10: mod_base = OTHER; note = 2prime Fluoro Nucleotide
  modified_base 11: mod_base = OTHER; note = 2prime Fluoro Nucleotide
  modified_base 12: mod_base = OTHER; note = 2prime-O-methyl Nucleotide
  modified_base 13: mod_base = OTHER; note = 2prime-O-methyl Nucleotide
  modified_base 14: mod_base = OTHER; note = 2prime-O-methyl Nucleotide
  modified_base 15: mod_base = OTHER; note = 2prime-O-methyl Nucleotide
  modified_base 16: mod_base = OTHER; note = 2prime-O-methyl Nucleotide
  modified_base 17: mod_base = OTHER; note = 2prime-O-methyl Nucleotide
  modified_base 18: mod_base = OTHER; note = 2prime-O-methyl Nucleotide
  modified_base 19: mod_base = OTHER; note = 2prime-O-methyl Nucleotide
  modified_base 19..20: mod_base = OTHER; note = Phosphorothioate Linkage
  modified_base 20: mod_base = OTHER; note = 2prime-O-methyl Nucleotide
  modified_base 20..21: mod_base = OTHER; note = Phosphorothioate Linkage
  modified_base 21: mod_base = OTHER; note = 2prime-O-methyl Nucleotide
ctgtacaagtgctcagttcca

SEQ ID NO: 95 - RNA, 21 nt, synthetic construct
  source 1..21: mol_type = other RNA
  modified_base 1: mod_base = OTHER; note = 2prime-O-methyl Nucleotide
  modified_base 1..2: mod_base = OTHER; note = Phosphorothioate Linkage
  modified_base 2: mod_base = OTHER; note = 2prime-O-methyl Nucleotide
  modified_base 2..3: mod_base = OTHER; note = Phosphorothioate Linkage
  modified_base 3: mod_base = OTHER; note = 2prime-O-methyl Nucleotide
  modified_base 4: mod_base = OTHER; note = 2prime-O-methyl Nucleotide
  modified_base 5: mod_base = OTHER; note = 2prime-O-methyl Nucleotide
  modified_base 6: mod_base = OTHER; note = 2prime-O-methyl Nucleotide
  modified_base 7: mod_base = OTHER; note = 2prime Fluoro Nucleotide
  modified_base 8: mod_base = OTHER; note = 2prime-O-methyl Nucleotide
  modified_base 9: mod_base = OTHER; note = 2prime Fluoro Nucleotide
  modified_base 10: mod_base = OTHER; note = 2prime Fluoro Nucleotide
  modified_base 11: mod_base = OTHER; note = 2prime Fluoro Nucleotide
  modified_base 12: mod_base = OTHER; note = 2prime-O-methyl Nucleotide
  modified_base 13: mod_base = OTHER; note = 2prime-O-methyl Nucleotide
  modified_base 14: mod_base = OTHER; note = 2prime-O-methyl Nucleotide
  modified_base 15: mod_base = OTHER; note = 2prime-O-methyl Nucleotide
  modified_base 16: mod_base = OTHER; note = 2prime-O-methyl Nucleotide
  modified_base 17: mod_base = OTHER; note = 2prime-O-methyl Thymine
  modified_base 18: mod_base = OTHER; note = 2prime-O-methyl Nucleotide
  modified_base 19: mod_base = OTHER; note = 2prime-O-methyl Nucleotide
  modified_base 19..20: mod_base = OTHER; note = Phosphorothioate Linkage
  modified_base 20: mod_base = OTHER; note = 2prime-O-methyl Nucleotide
  modified_base 20..21: mod_base = OTHER; note = Phosphorothioate Linkage
  modified_base 21: mod_base = OTHER; note = 2prime-O-methyl Nucleotide
ctgtacaagtgctcagttcca

SEQ ID NO: 96 - RNA, 21 nt, synthetic construct
  source 1..21: mol_type = other RNA
  modified_base 1: mod_base = OTHER; note = 2prime-O-methyl Nucleotide
  modified_base 1..2: mod_base = OTHER; note = Phosphorothioate Linkage
  modified_base 2: mod_base = OTHER; note = 2prime-O-methyl Nucleotide
  modified_base 2..3: mod_base = OTHER; note = Phosphorothioate Linkage
  modified_base 3: mod_base = OTHER; note = 2prime-O-methyl Nucleotide
  modified_base 4: mod_base = OTHER; note = 2prime-O-methyl Nucleotide
  modified_base 5: mod_base = OTHER; note = 2prime-O-methyl Nucleotide
  modified_base 6: mod_base = OTHER; note = 2prime-O-methyl Nucleotide
  modified_base 7: mod_base = OTHER; note = 2prime Fluoro Nucleotide
  modified_base 8: mod_base = OTHER; note = 2prime-O-methyl Nucleotide
  modified_base 9: mod_base = OTHER; note = 2prime Fluoro Nucleotide
  modified_base 10: mod_base = OTHER; note = 2prime Fluoro Nucleotide
  modified_base 11: mod_base = OTHER; note = 2prime Fluoro Nucleotide
  modified_base 12: mod_base = OTHER; note = 2prime-O-methyl Nucleotide
  modified_base 13: mod_base = OTHER; note = 2prime-O-methyl Nucleotide
  modified_base 14: mod_base = OTHER; note = 2prime-O-methyl Nucleotide
  modified_base 15: mod_base = OTHER; note = 2prime-O-methyl Nucleotide
  modified_base 16: mod_base = OTHER; note = 2prime-O-methyl Nucleotide
  modified_base 17: mod_base = OTHER; note = 2prime-O-methyl Nucleotide
  modified_base 18: mod_base = OTHER; note = 2prime-O-methyl Nucleotide
  modified_base 19: mod_base = OTHER; note = 2prime-O-methyl Nucleotide
  modified_base 19..20: mod_base = OTHER; note = Phosphorothioate Linkage
  modified_base 20: mod_base = OTHER; note = 2prime-O-methyl Nucleotide
  modified_base 20..21: mod_base = OTHER; note = Phosphorothioate Linkage
  modified_base 21: mod_base = OTHER; note = 2prime-O-methyl Nucleotide
ctgtacaagtgctcagttcca

SEQ ID NO: 97 - RNA, 21 nt, synthetic construct
  source 1..21: mol_type = other RNA
  modified_base 1: mod_base = OTHER; note = 2prime-O-methyl Nucleotide
  modified_base 1..2: mod_base = OTHER; note = Phosphorothioate Linkage
  modified_base 2: mod_base = OTHER; note = 2prime-O-methyl Nucleotide
  modified_base 2..3: mod_base = OTHER; note = Phosphorothioate Linkage
  modified_base 3: mod_base = OTHER; note = 2prime-O-methyl Nucleotide
  modified_base 4: mod_base = OTHER; note = 2prime-O-methyl Nucleotide
  modified_base 5: mod_base = OTHER; note = 2prime-O-methyl Nucleotide
  modified_base 6: mod_base = OTHER; note = 2prime-O-methyl Nucleotide
  modified_base 7: mod_base = OTHER; note = 2prime-O-methyl Nucleotide
  modified_base 8: mod_base = OTHER; note = 2prime-O-methyl Nucleotide
  modified_base 9: mod_base = OTHER; note = 2prime Fluoro Nucleotide
  modified_base 11: mod_base = OTHER; note = 2prime Fluoro Nucleotide
  modified_base 12: mod_base = OTHER; note = 2prime-O-methyl Nucleotide
  modified_base 13: mod_base = OTHER; note = 2prime-O-methyl Nucleotide
  modified_base 14: mod_base = OTHER; note = 2prime-O-methyl Nucleotide
  modified_base 15: mod_base = OTHER; note = 2prime-O-methyl Nucleotide
  modified_base 16: mod_base = OTHER; note = 2prime-O-methyl Nucleotide
  modified_base 17: mod_base = OTHER; note = 2prime-O-methyl Nucleotide
  modified_base 18: mod_base = OTHER; note = 2prime-O-methyl Nucleotide
  modified_base 19: mod_base = OTHER; note = 2prime-O-methyl Nucleotide
  modified_base 19..20: mod_base = OTHER; note = Phosphorothioate Linkage
  modified_base 20: mod_base = OTHER; note = 2prime-O-methyl Nucleotide
  modified_base 20..21: mod_base = OTHER; note = Phosphorothioate Linkage
  modified_base 21: mod_base = OTHER; note = 2prime-O-methyl Nucleotide
ctgtacaagtgctcagttcca

SEQ ID NO: 98 - RNA, 20 nt, synthetic construct
  source 1..20: mol_type = other RNA
  modified_base 1: mod_base = OTHER; note = 2prime-O-methyl Nucleotide
  modified_base 1..2: mod_base = OTHER; note = Phosphorothioate Linkage
  modified_base 2: mod_base = OTHER; note = 2prime-O-methyl Nucleotide
  modified_base 2..3: mod_base = OTHER; note = Phosphorothioate Linkage
  modified_base 3: mod_base = OTHER; note = 2prime-O-methyl Nucleotide
  modified_base 4: mod_base = OTHER; note = 2prime-O-methyl Nucleotide
  modified_base 5: mod_base = OTHER; note = 2prime-O-methyl Nucleotide
  modified_base 6: mod_base = OTHER; note = 2prime-O-methyl Nucleotide
  modified_base 7: mod_base = OTHER; note = 2prime-O-methyl Nucleotide
  modified_base 8: mod_base = OTHER; note = 2prime-O-methyl Nucleotide
  modified_base 9: mod_base = OTHER; note = 2prime Fluoro Nucleotide
  modified_base 10: mod_base = OTHER; note = 2prime Fluoro Nucleotide
  modified_base 11: mod_base = OTHER; note = 2prime-O-methyl Nucleotide
  modified_base 12: mod_base = OTHER; note = 2prime-O-methyl Nucleotide
  modified_base 13: mod_base = OTHER; note = 2prime-O-methyl Nucleotide
  modified_base 14: mod_base = OTHER; note = 2prime-O-methyl Nucleotide
  modified_base 15: mod_base = OTHER; note = 2prime-O-methyl Nucleotide
  modified_base 16: mod_base = OTHER; note = 2prime-O-methyl Nucleotide
  modified_base 17: mod_base = OTHER; note = 2prime-O-methyl Nucleotide
  modified_base 18: mod_base = OTHER; note = 2prime-O-methyl Nucleotide
  modified_base 19: mod_base = OTHER; note = 2prime-O-methyl Nucleotide
  modified_base 19..20: mod_base = OTHER; note = Phosphorothioate Linkage
  modified_base 20: mod_base = OTHER; note = 2prime-O-methyl Nucleotide
  modified_base 18..19: mod_base = OTHER; note = Phosphorothioate Linkage
ctgtacaaggctcagttcca

SEQ ID NO: 99 - RNA, 21 nt, synthetic construct
  source 1..21: mol_type = other RNA
  modified_base 1: mod_base = OTHER; note = 2prime-O-methyl Nucleotide
  modified_base 1..2: mod_base = OTHER; note = Phosphorothioate Linkage
  modified_base 2: mod_base = OTHER; note = 2prime-O-methyl Nucleotide
  modified_base 2..3: mod_base = OTHER; note = Phosphorothioate Linkage
  modified_base 3: mod_base = OTHER; note = 2prime-O-methyl Nucleotide
  modified_base 4: mod_base = OTHER; note = 2prime-O-methyl Nucleotide
  modified_base 5: mod_base = OTHER; note = 2prime-O-methyl Nucleotide
  modified_base 6: mod_base = OTHER; note = 2prime-O-methyl Nucleotide
  modified_base 7: mod_base = OTHER; note = 2prime Fluoro Nucleotide
  modified_base 8: mod_base = OTHER; note = 2prime-O-methyl Nucleotide
  modified_base 9: mod_base = OTHER; note = 2prime Fluoro Nucleotide
  modified_base 10: mod_base = OTHER; note = 2prime Fluoro Nucleotide
  modified_base 12: mod_base = OTHER; note = 2prime-O-methyl Nucleotide
  modified_base 13: mod_base = OTHER; note = 2prime-O-methyl Nucleotide
  modified_base 14: mod_base = OTHER; note = 2prime-O-methyl Nucleotide
  modified_base 15: mod_base = OTHER; note = 2prime-O-methyl Nucleotide
  modified_base 16: mod_base = OTHER; note = 2prime-O-methyl Nucleotide
  modified_base 17: mod_base = OTHER; note = 2prime-O-methyl Nucleotide
  modified_base 18: mod_base = OTHER; note = 2prime-O-methyl Nucleotide
  modified_base 19: mod_base = OTHER; note = 2prime-O-methyl Nucleotide
  modified_base 19..20: mod_base = OTHER; note = Phosphorothioate Linkage
  modified_base 20: mod_base = OTHER; note = 2prime-O-methyl Nucleotide
  modified_base 20..21: mod_base = OTHER; note = Phosphorothioate Linkage
  modified_base 21: mod_base = OTHER; note = 2prime-O-methyl Nucleotide
ctgtacaagtgctcagttcca

SEQ ID NO: 100 - RNA, 17 nt, synthetic construct
  source 1..17: mol_type = other RNA
  modified_base 1: mod_base = OTHER; note = 2prime-O-methyl Nucleotide
  modified_base 1..2: mod_base = OTHER; note = Phosphorothioate Linkage
  modified_base 2: mod_base = OTHER; note = 2prime-O-methyl Nucleotide
  modified_base 2..3: mod_base = OTHER; note = Phosphorothioate Linkage
  modified_base 3: mod_base = OTHER; note = 2prime Fluoro Nucleotide
  modified_base 4: mod_base = OTHER; note = 2prime-O-methyl Nucleotide
  modified_base 5: mod_base = OTHER; note = 2prime Fluoro Nucleotide
  modified_base 6: mod_base = OTHER; note = 2prime Fluoro Nucleotide
  modified_base 7: mod_base = OTHER; note = 2prime Fluoro Nucleotide
  modified_base 8: mod_base = OTHER; note = 2prime-O-methyl Nucleotide
  modified_base 9: mod_base = OTHER; note = 2prime-O-methyl Nucleotide
  modified_base 10: mod_base = OTHER; note = 2prime-O-methyl Nucleotide
  modified_base 11: mod_base = OTHER; note = 2prime-O-methyl Nucleotide
  modified_base 12: mod_base = OTHER; note = 2prime-O-methyl Nucleotide
  modified_base 13: mod_base = OTHER; note = 2prime-O-methyl Nucleotide
  modified_base 14: mod_base = OTHER; note = 2prime-O-methyl Nucleotide
  modified_base 15: mod_base = OTHER; note = 2prime-O-methyl Nucleotide
  modified_base 16: mod_base = OTHER; note = 2prime-O-methyl Nucleotide
  modified_base 17: mod_base = OTHER; note = 2prime-O-methyl Nucleotide
  modified_base 15..16: mod_base = OTHER; note = Phosphorothioate Linkage
  modified_base 16..17: mod_base = OTHER; note = Phosphorothioate Linkage
acaagtgctcagttcca

SEQ ID NO: 101 - RNA, 21 nt, synthetic construct
  source 1..21: mol_type = other RNA
  modified_base 1: mod_base = OTHER; note = 2prime-O-methyl Nucleotide
  modified_base 1..2: mod_base = OTHER; note = Phosphorothioate Linkage
  modified_base 2: mod_base = OTHER; note = 2prime-O-methyl Nucleotide
  modified_base 2..3: mod_base = OTHER; note = Phosphorothioate Linkage
  modified_base 3: mod_base = OTHER; note = 2prime-O-methyl Nucleotide
  modified_base 4: mod_base = OTHER; note = 2prime-O-methyl Nucleotide
  modified_base 5: mod_base = OTHER; note = 2prime-O-methyl Nucleotide
  modified_base 6: mod_base = OTHER; note = 2prime-O-methyl Nucleotide
  modified_base 7: mod_base = OTHER; note = 2prime Fluoro Nucleotide
  modified_base 8: mod_base = OTHER; note = 2prime-O-methyl Nucleotide
  modified_base 9: mod_base = OTHER; note = 2prime Fluoro Nucleotide
  modified_base 10: mod_base = OTHER; note = 2prime Fluoro Nucleotide
  modified_base 11: mod_base = OTHER; note = 2prime Fluoro Nucleotide
  modified_base 12: mod_base = OTHER; note = 2prime-O-methyl Nucleotide
  modified_base 13: mod_base = OTHER; note = 2prime-O-methyl Nucleotide
  modified_base 14: mod_base = OTHER; note = 2prime-O-methyl Nucleotide
  modified_base 15: mod_base = OTHER; note = 2prime-O-methyl Nucleotide
  modified_base 16: mod_base = OTHER; note = 2prime-O-methyl Nucleotide
  modified_base 17: mod_base = OTHER; note = 2prime-O-methyl Nucleotide
  modified_base 18: mod_base = OTHER; note = 2prime-O-methyl Nucleotide
  modified_base 19: mod_base = OTHER; note = 2prime-O-methyl Nucleotide
  modified_base 19..20: mod_base = OTHER; note = Phosphorothioate Linkage
  modified_base 20: mod_base = OTHER; note = 2prime-O-methyl Nucleotide
  modified_base 20..21: mod_base = OTHER; note = Phosphorothioate Linkage
  modified_base 21: mod_base = OTHER; note = 2prime-O-methyl Nucleotide
cggtacaagtgctcagttcca

SEQ ID NO: 102 - RNA, 21 nt, synthetic construct
  source 1..21: mol_type = other RNA
  modified_base 1: mod_base = OTHER; note = 2prime-O-methyl Nucleotide
  modified_base 1..2: mod_base = OTHER; note = Phosphorothioate Linkage
  modified_base 2: mod_base = OTHER; note = 2prime-O-methyl Nucleotide
  modified_base 2..3: mod_base = OTHER; note = Phosphorothioate Linkage
  modified_base 3: mod_base = OTHER; note = 2prime-O-methyl Nucleotide
  modified_base 4: mod_base = OTHER; note = 2prime-O-methyl Nucleotide
  modified_base 5: mod_base = OTHER; note = 2prime-O-methyl Nucleotide
  modified_base 6: mod_base = OTHER; note = 2prime-O-methyl Nucleotide
  modified_base 7: mod_base = OTHER; note = 2prime Fluoro Nucleotide
  modified_base 8: mod_base = OTHER; note = 2prime-O-methyl Nucleotide
  modified_base 11: mod_base = OTHER; note = 2prime Fluoro Nucleotide
  modified_base 10: mod_base = OTHER; note = 2prime Fluoro Nucleotide
  modified_base 12: mod_base = OTHER; note = 2prime-O-methyl Nucleotide
  modified_base 13: mod_base = OTHER; note = 2prime-O-methyl Nucleotide
  modified_base 14: mod_base = OTHER; note = 2prime-O-methyl Nucleotide
  modified_base 15: mod_base = OTHER; note = 2prime-O-methyl Nucleotide
  modified_base 16: mod_base = OTHER; note = 2prime-O-methyl Nucleotide
  modified_base 17: mod_base = OTHER; note = 2prime-O-methyl Nucleotide
  modified_base 18: mod_base = OTHER; note = 2prime-O-methyl Nucleotide
  modified_base 20..21: mod_base = OTHER; note = Phosphorothioate Linkage
  modified_base 19: mod_base = OTHER; note = 2prime-O-methyl Nucleotide
  modified_base 19..20: mod_base = OTHER; note = Phosphorothioate Linkage
  modified_base 20: mod_base = OTHER; note = 2prime-O-methyl Nucleotide
  modified_base 9: mod_base = OTHER; note = abasic moiety
  modified_base 21: mod_base = OTHER; note = 2prime-O-methyl Nucleotide
ctgtacaantgctcagttcca

SEQ ID NO: 103 - RNA, 21 nt, synthetic construct
  source 1..21: mol_type = other RNA
  modified_base 1: mod_base = OTHER; note = 2prime-O-methyl Nucleotide
  modified_base 1..2: mod_base = OTHER; note = Phosphorothioate Linkage
  modified_base 2: mod_base = OTHER; note = 2prime-O-methyl Nucleotide
  modified_base 2..3: mod_base = OTHER; note = Phosphorothioate Linkage
  modified_base 3: mod_base = OTHER; note = 2prime-O-methyl Nucleotide
  modified_base 4: mod_base = OTHER; note = 2prime-O-methyl Nucleotide
  modified_base 5: mod_base = OTHER; note = 2prime-O-methyl Nucleotide
  modified_base 6: mod_base = OTHER; note = 2prime-O-methyl Nucleotide
  modified_base 7: mod_base = OTHER; note = 2prime Fluoro Nucleotide
  modified_base 8: mod_base = OTHER; note = 2prime-O-methyl Nucleotide
  modified_base 9: mod_base = OTHER; note = 2prime Fluoro Nucleotide
  modified_base 11: mod_base = OTHER; note = abasic moiety
  modified_base 10: mod_base = OTHER; note = 2prime Fluoro Nucleotide
  modified_base 21: mod_base = OTHER; note = 2prime-O-methyl Nucleotide
  modified_base 12: mod_base = OTHER; note = 2prime-O-methyl Nucleotide
  modified_base 13: mod_base = OTHER; note = 2prime-O-methyl Nucleotide
  modified_base 14: mod_base = OTHER; note = 2prime-O-methyl Nucleotide
  modified_base 15: mod_base = OTHER; note = 2prime-O-methyl Nucleotide
  modified_base 16: mod_base = OTHER; note = 2prime-O-methyl Nucleotide
  modified_base 17: mod_base = OTHER; note = 2prime-O-methyl Nucleotide
  modified_base 18: mod_base = OTHER; note = 2prime-O-methyl Nucleotide
  modified_base 20..21: mod_base = OTHER; note = Phosphorothioate Linkage
  modified_base 19: mod_base = OTHER; note = 2prime-O-methyl Nucleotide
  modified_base 19..20: mod_base = OTHER; note = Phosphorothioate Linkage
  modified_base 20: mod_base = OTHER; note = 2prime-O-methyl Nucleotide
ctgtacaagtnctcagttcca

SEQ ID NO: 104 - RNA, 21 nt, synthetic construct
  source 1..21: mol_type = other RNA
  modified_base 1: mod_base = OTHER; note = 2prime-O-methyl Nucleotide
  modified_base 1..2: mod_base = OTHER; note = Phosphorothioate Linkage
  modified_base 2: mod_base = OTHER; note = 2prime-O-methyl Nucleotide
  modified_base 2..3: mod_base = OTHER; note = Phosphorothioate Linkage
  modified_base 3: mod_base = OTHER; note = 2prime-O-methyl Nucleotide
  modified_base 4: mod_base = OTHER; note = 2prime-O-methyl Nucleotide
  modified_base 5: mod_base = OTHER; note = 2prime-O-methyl Nucleotide
  modified_base 6: mod_base = OTHER; note = 2prime-O-methyl Nucleotide
  modified_base 7: mod_base = OTHER; note = 2prime Fluoro Nucleotide
  modified_base 8: mod_base = OTHER; note = 2prime-O-methyl Nucleotide
  modified_base 9: mod_base = OTHER; note = 2prime Fluoro Nucleotide
  modified_base 10: mod_base = OTHER; note = abasic moiety
  modified_base 11: mod_base = OTHER; note = 2prime Fluoro Nucleotide
  modified_base 21: mod_base = OTHER; note = 2prime-O-methyl Nucleotide
  modified_base 12: mod_base = OTHER; note = 2prime-O-methyl Nucleotide
  modified_base 13: mod_base = OTHER; note = 2prime-O-methyl Nucleotide
  modified_base 14: mod_base = OTHER; note = 2prime-O-methyl Nucleotide
  modified_base 15: mod_base = OTHER; note = 2prime-O-methyl Nucleotide
  modified_base 16: mod_base = OTHER; note = 2prime-O-methyl Nucleotide
  modified_base 17: mod_base = OTHER; note = 2prime-O-methyl Nucleotide
  modified_base 18: mod_base = OTHER; note = 2prime-O-methyl Nucleotide
  modified_base 20..21: mod_base = OTHER; note = Phosphorothioate Linkage
  modified_base 19: mod_base = OTHER; note = 2prime-O-methyl Nucleotide
  modified_base 19..20: mod_base = OTHER; note = Phosphorothioate Linkage
  modified_base 20: mod_base = OTHER; note = 2prime-O-methyl Nucleotide
ctgtacaagngctcagttcca

SEQ ID NO: 105 - RNA, 21 nt, synthetic construct
  source 1..21: mol_type = other RNA
  modified_base 1: mod_base = OTHER; note = 2prime-O-methyl Nucleotide
  modified_base 1..2: mod_base = OTHER; note = Phosphorothioate Linkage
  modified_base 2: mod_base = OTHER; note = 2prime-O-methyl Nucleotide
  modified_base 2..3: mod_base = OTHER; note = Phosphorothioate Linkage
  modified_base 3: mod_base = OTHER; note = 2prime-O-methyl Nucleotide
  modified_base 4: mod_base = OTHER; note = 2prime-O-methyl Nucleotide
  modified_base 5: mod_base = OTHER; note = 2prime-O-methyl Nucleotide
  modified_base 6: mod_base = OTHER; note = 2prime-O-methyl Nucleotide
  modified_base 7: mod_base = OTHER; note = 2prime Fluoro Nucleotide
  modified_base 8: mod_base = OTHER; note = 2prime-O-methyl Nucleotide
  modified_base 9: mod_base = OTHER; note = 2prime Fluoro Nucleotide
  modified_base 10: mod_base = OTHER; note = abasic moiety
  modified_base 11: mod_base = OTHER; note = 2prime Fluoro Nucleotide
  modified_base 21: mod_base = OTHER; note = 2prime-O-methyl Nucleotide
  modified_base 12: mod_base = OTHER; note = 2prime-O-methyl Nucleotide
  modified_base 13: mod_base = OTHER; note = 2prime-O-methyl Nucleotide
  modified_base 14: mod_base = OTHER; note = 2prime-O-methyl Nucleotide
  modified_base 15: mod_base = OTHER; note = 2prime-O-methyl Nucleotide
  modified_base 16: mod_base = OTHER; note = 2prime-O-methyl Nucleotide
  modified_base 17: mod_base = OTHER; note = 2prime-O-methyl Nucleotide
  modified_base 18: mod_base = OTHER; note = 2prime-O-methyl Nucleotide
  modified_base 20..21: mod_base = OTHER; note = Phosphorothioate Linkage
  modified_base 19: mod_base = OTHER; note = 2prime-O-methyl Nucleotide
  modified_base 19..20: mod_base = OTHER; note = Phosphorothioate Linkage
  modified_base 20: mod_base = OTHER; note = 2prime-O-methyl Nucleotide
ctgtacaagngctcagttcca

SEQ ID NO: 106 - RNA, 21 nt, synthetic construct
  source 1..21: mol_type = other RNA
  modified_base 1: mod_base = OTHER; note = 2prime-O-methyl Nucleotide
  modified_base 1..2: mod_base = OTHER; note = Phosphorothioate Linkage
  modified_base 2: mod_base = OTHER; note = 2prime-O-methyl Nucleotide
  modified_base 2..3: mod_base = OTHER; note = Phosphorothioate Linkage
  modified_base 3: mod_base = OTHER; note = 2prime-O-methyl Nucleotide
  modified_base 4: mod_base = OTHER; note = 2prime-O-methyl Nucleotide
  modified_base 5: mod_base = OTHER; note = 2prime-O-methyl Nucleotide
  modified_base 6: mod_base = OTHER; note = 2prime-O-methyl Nucleotide
  modified_base 7: mod_base = OTHER; note = 2prime Fluoro Nucleotide
  modified_base 8: mod_base = OTHER; note = 2prime-O-methyl Nucleotide
  modified_base 9: mod_base = OTHER; note = 2prime Fluoro Nucleotide
  modified_base 10: mod_base = OTHER; note = abasic moiety
  modified_base 11: mod_base = OTHER; note = 2prime Fluoro Nucleotide
  modified_base 21: mod_base = OTHER; note = 2prime-O-methyl Nucleotide
  modified_base 12: mod_base = OTHER; note = 2prime-O-methyl Nucleotide
  modified_base 13: mod_base = OTHER; note = 2prime-O-methyl Nucleotide
  modified_base 14: mod_base = OTHER; note = 2prime-O-methyl Nucleotide
  modified_base 15: mod_base = OTHER; note = 2prime-O-methyl Nucleotide
  modified_base 16: mod_base = OTHER; note = 2prime-O-methyl Nucleotide
  modified_base 17: mod_base = OTHER; note = 2prime-O-methyl Nucleotide
  modified_base 18: mod_base = OTHER; note = 2prime-O-methyl Nucleotide
  modified_base 20..21: mod_base = OTHER; note = Phosphorothioate Linkage
  modified_base 19: mod_base = OTHER; note = 2prime-O-methyl Nucleotide
  modified_base 19..20: mod_base = OTHER; note = Phosphorothioate Linkage
  modified_base 20: mod_base = OTHER; note = 2prime-O-methyl Nucleotide
ctgtacaagngctcagttcca

SEQ ID NO: 107 - RNA, 21 nt, synthetic construct
  source 1..21: mol_type = other RNA
  modified_base 1: mod_base = OTHER; note = 2prime-O-methyl Nucleotide
  modified_base 1..2: mod_base = OTHER; note = Phosphorothioate Linkage
  modified_base 2: mod_base = OTHER; note = 2prime-O-methyl Nucleotide
  modified_base 2..3: mod_base = OTHER; note = Phosphorothioate Linkage
  modified_base 3: mod_base = OTHER; note = 2prime-O-methyl Nucleotide
  modified_base 4: mod_base = OTHER; note = 2prime-O-methyl Nucleotide
  modified_base 5: mod_base = OTHER; note = 2prime-O-methyl Nucleotide
  modified_base 6: mod_base = OTHER; note = 2prime-O-methyl Nucleotide
  modified_base 7: mod_base = OTHER; note = 2prime Fluoro Nucleotide
  modified_base 8: mod_base = OTHER; note = 2prime-O-methyl Nucleotide
  modified_base 9: mod_base = OTHER; note = 2prime Fluoro Nucleotide
  modified_base 10: mod_base = OTHER; note = abasic moiety
  modified_base 11: mod_base = OTHER; note = 2prime Fluoro Nucleotide
  modified_base 21: mod_base = OTHER; note = 2prime-O-methyl Nucleotide
  modified_base 12: mod_base = OTHER; note = 2prime-O-methyl Nucleotide
  modified_base 13: mod_base = OTHER; note = 2prime-O-methyl Nucleotide
  modified_base 14: mod_base = OTHER; note = 2prime-O-methyl Nucleotide
  modified_base 15: mod_base = OTHER; note = 2prime-O-methyl Nucleotide
  modified_base 16: mod_base = OTHER; note = 2prime-O-methyl Nucleotide
  modified_base 17: mod_base = OTHER; note = 2prime-O-methyl Nucleotide
  modified_base 18: mod_base = OTHER; note = 2prime-O-methyl Nucleotide
  modified_base 20..21: mod_base = OTHER; note = Phosphorothioate Linkage
  modified_base 19: mod_base = OTHER; note = 2prime-O-methyl Nucleotide
  modified_base 19..20: mod_base = OTHER; note = Phosphorothioate Linkage
  modified_base 20: mod_base = OTHER; note = 2prime-O-methyl Nucleotide
ctgtacaagngctcagttcca

SEQ ID NO: 108 - RNA, 21 nt, synthetic construct
  source 1..21: mol_type = other RNA
  modified_base 1: mod_base = OTHER; note = 2prime-O-methyl Nucleotide
  modified_base 1..2: mod_base = OTHER; note = Phosphorothioate Linkage
  modified_base 2: mod_base = OTHER; note = 2prime-O-methyl Nucleotide
  modified_base 2..3: mod_base = OTHER; note = Phosphorothioate Linkage
  modified_base 3: mod_base = OTHER; note = 2prime-O-methyl Nucleotide
  modified_base 4: mod_base = OTHER; note = 2prime-O-methyl Nucleotide
  modified_base 5: mod_base = OTHER; note = 2prime-O-methyl Nucleotide
  modified_base 6: mod_base = OTHER; note = 2prime-O-methyl Nucleotide
  modified_base 7: mod_base = OTHER; note = 2prime-O-methyl Nucleotide
  modified_base 8: mod_base = OTHER; note = 2prime-O-methyl Nucleotide
  modified_base 9: mod_base = OTHER; note = 2prime Fluoro Nucleotide
  modified_base 10: mod_base = OTHER; note = abasic moiety
  modified_base 11: mod_base = OTHER; note = 2prime Fluoro Nucleotide
  modified_base 21: mod_base = OTHER; note = 2prime-O-methyl Nucleotide
  modified_base 12: mod_base = OTHER; note = 2prime-O-methyl Nucleotide
  modified_base 13: mod_base = OTHER; note = 2prime-O-methyl Nucleotide
  modified_base 14: mod_base = OTHER; note = 2prime-O-methyl Nucleotide
  modified_base 15: mod_base = OTHER; note = 2prime-O-methyl Nucleotide
  modified_base 16: mod_base = OTHER; note = 2prime-O-methyl Nucleotide
  modified_base 17: mod_base = OTHER; note = 2prime-O-methyl Nucleotide
  modified_base 18: mod_base = OTHER; note = 2prime-O-methyl Nucleotide
  modified_base 20..21: mod_base = OTHER; note = Phosphorothioate Linkage
  modified_base 19: mod_base = OTHER; note = 2prime-O-methyl Nucleotide
  modified_base 19..20: mod_base = OTHER; note = Phosphorothioate Linkage
  modified_base 20: mod_base = OTHER; note = 2prime-O-methyl Nucleotide
ctgtacaagngctcagttcca

SEQ ID NO: 109 - RNA, 21 nt, synthetic construct
  source 1..21: mol_type = other RNA
  modified_base 1: mod_base = OTHER; note = 2prime-O-methyl Nucleotide
  modified_base 1..2: mod_base = OTHER; note = Phosphorothioate Linkage
  modified_base 2: mod_base = OTHER; note = 2prime-O-methyl Nucleotide
  modified_base 2..3: mod_base = OTHER; note = Phosphorothioate Linkage
  modified_base 3: mod_base = OTHER; note = 2prime-O-methyl Nucleotide
  modified_base 4: mod_base = OTHER; note = 2prime-O-methyl Nucleotide
  modified_base 5: mod_base = OTHER; note = 2prime-O-methyl Nucleotide
  modified_base 6: mod_base = OTHER; note = 2prime-O-methyl Nucleotide
  modified_base 8: mod_base = OTHER; note = 2prime-O-methyl Nucleotide
  modified_base 9: mod_base = OTHER; note = 2prime Fluoro Nucleotide
  modified_base 10: mod_base = OTHER; note = abasic moiety
  modified_base 11: mod_base = OTHER; note = 2prime Fluoro Nucleotide
  modified_base 21: mod_base = OTHER; note = 2prime-O-methyl Nucleotide
  modified_base 12: mod_base = OTHER; note = 2prime-O-methyl Nucleotide
  modified_base 13: mod_base = OTHER; note = 2prime-O-methyl Nucleotide
  modified_base 14: mod_base = OTHER; note = 2prime-O-methyl Nucleotide
  modified_base 15: mod_base = OTHER; note = 2prime-O-methyl Nucleotide
  modified_base 16: mod_base = OTHER; note = 2prime-O-methyl Nucleotide
  modified_base 17: mod_base = OTHER; note = 2prime-O-methyl Nucleotide
  modified_base 18: mod_base = OTHER; note = 2prime-O-methyl Nucleotide
  modified_base 20..21: mod_base = OTHER; note = Phosphorothioate Linkage
  modified_base 19: mod_base = OTHER; note = 2prime-O-methyl Nucleotide
  modified_base 19..20: mod_base = OTHER; note = Phosphorothioate Linkage
  modified_base 20: mod_base = OTHER; note = 2prime-O-methyl Nucleotide
ctgtacaagngctcagttcca

SEQ ID NO: 110 - RNA, 19 nt, synthetic construct
  source 1..19: mol_type = other RNA
  modified_base 1: mod_base = OTHER; note = 2prime-O-methyl Nucleotide
  modified_base 1..2: mod_base = OTHER; note = Phosphorothioate Linkage
  modified_base 2: mod_base = OTHER; note = 2prime-O-methyl Nucleotide
  modified_base 2..3: mod_base = OTHER; note = Phosphorothioate Linkage
  modified_base 3: mod_base = OTHER; note = 2prime-O-methyl Nucleotide
  modified_base 4: mod_base = OTHER; note = 2prime-O-methyl Nucleotide
  modified_base 6: mod_base = OTHER; note = 2prime-O-methyl Nucleotide
  modified_base 7: mod_base = OTHER; note = 2prime Fluoro Nucleotide
  modified_base 9: mod_base = OTHER; note = 2prime Fluoro Nucleotide
  modified_base 8: mod_base = OTHER; note = abasic moiety
  modified_base 19: mod_base = OTHER; note = 2prime-O-methyl Nucleotide
  modified_base 11: mod_base = OTHER; note = 2prime-O-methyl Nucleotide
  modified_base 12: mod_base = OTHER; note = 2prime-O-methyl Nucleotide
  modified_base 13: mod_base = OTHER; note = 2prime-O-methyl Nucleotide
  modified_base 14: mod_base = OTHER; note = 2prime-O-methyl Nucleotide
  modified_base 15: mod_base = OTHER; note = 2prime-O-methyl Nucleotide
  modified_base 16: mod_base = OTHER; note = 2prime-O-methyl Nucleotide
  modified_base 17: mod_base = OTHER; note = 2prime-O-methyl Nucleotide
  modified_base 18: mod_base = OTHER; note = 2prime-O-methyl Nucleotide
  modified_base 18..19: mod_base = OTHER; note = Phosphorothioate Linkage
  modified_base 17..18: mod_base = OTHER; note = Phosphorothioate Linkage
  modified_base 10: mod_base = OTHER; note = 2prime-O-methyl Nucleotide
gtacaagngctcagttcca

SEQ ID NO: 111 - RNA, 17 nt, synthetic construct
  source 1..17: mol_type = other RNA
  modified_base 1: mod_base = OTHER; note = 2prime-O-methyl Nucleotide
  modified_base 1..2: mod_base = OTHER; note = Phosphorothioate Linkage
  modified_base 2: mod_base = OTHER; note = 2prime-O-methyl Nucleotide
  modified_base 2..3: mod_base = OTHER; note = Phosphorothioate Linkage
  modified_base 4: mod_base = OTHER; note = 2prime-O-methyl Nucleotide
  modified_base 5: mod_base = OTHER; note = 2prime Fluoro Nucleotide
  modified_base 7: mod_base = OTHER; note = 2prime Fluoro Nucleotide
  modified_base 17: mod_base = OTHER; note = 2prime-O-methyl Nucleotide
  modified_base 8: mod_base = OTHER; note = 2prime-O-methyl Nucleotide
  modified_base 9: mod_base = OTHER; note = 2prime-O-methyl Nucleotide
  modified_base 6: mod_base = OTHER; note = abasic moiety
  modified_base 10: mod_base = OTHER; note = 2prime-O-methyl Nucleotide
  modified_base 11: mod_base = OTHER; note = 2prime-O-methyl Nucleotide
  modified_base 12: mod_base = OTHER; note = 2prime-O-methyl Nucleotide
  modified_base 13: mod_base = OTHER; note = 2prime-O-methyl Nucleotide
  modified_base 14: mod_base = OTHER; note = 2prime-O-methyl Nucleotide
  modified_base 15: mod_base = OTHER; note = 2prime-O-methyl Nucleotide
  modified_base 16: mod_base = OTHER; note = 2prime-O-methyl Nucleotide
  modified_base 16..17: mod_base = OTHER; note = Phosphorothioate Linkage
  modified_base 15..16: mod_base = OTHER; note = Phosphorothioate Linkage
acaagngctcagttcca

SEQ ID NO: 112 - RNA, 23 nt, synthetic construct
  source 1..23: mol_type = other RNA
  modified_base 1: mod_base = OTHER; note = 2prime-O-methyl Nucleotide
  modified_base 1..2: mod_base = OTHER; note = Phosphorothioate Linkage
  modified_base 2: mod_base = OTHER; note = 2prime Fluoro Nucleotide
  modified_base 2..3: mod_base = OTHER; note = Phosphorothioate Linkage
  modified_base 3: mod_base = OTHER; note = 2prime-O-methyl Nucleotide
  modified_base 4: mod_base = OTHER; note = 2prime-O-methyl Nucleotide
  modified_base 5: mod_base = OTHER; note = 2prime-O-methyl Nucleotide
  modified_base 6: mod_base = OTHER; note = 2prime Fluoro Nucleotide
  modified_base 7: mod_base = OTHER; note = 2prime-O-methyl Nucleotide
  modified_base 8: mod_base = OTHER; note = 2prime-O-methyl Nucleotide
  modified_base 9: mod_base = OTHER; note = 2prime-O-methyl Nucleotide
  modified_base 10: mod_base = OTHER; note = 2prime-O-methyl Nucleotide
  modified_base 11: mod_base = OTHER; note = 2prime-O-methyl Nucleotide
  modified_base 12: mod_base = OTHER; note = 2prime-O-methyl Nucleotide
  modified_base 13: mod_base = OTHER; note = 2prime-O-methyl Nucleotide
  modified_base 14: mod_base = OTHER; note = 2prime Fluoro Nucleotide
  modified_base 15: mod_base = OTHER; note = 2prime-O-methyl Nucleotide
  modified_base 16: mod_base = OTHER; note = 2prime Fluoro Nucleotide
  modified_base 17: mod_base = OTHER; note = 2prime-O-methyl Nucleotide
  modified_base 18: mod_base = OTHER; note = 2prime-O-methyl Nucleotide
  modified_base 19: mod_base = OTHER; note = 2prime-O-methyl Nucleotide
  modified_base 20: mod_base = OTHER; note = 2prime-O-methyl Nucleotide
  modified_base 21: mod_base = OTHER; note = 2prime-O-methyl Nucleotide
  modified_base 21..22: mod_base = OTHER; note = Phosphorothioate Linkage
  modified_base 22: mod_base = OTHER; note = 2prime-O-methyl Nucleotide
  modified_base 22..23: mod_base = OTHER; note = Phosphorothioate Linkage
  modified_base 23: mod_base = OTHER; note = 2prime-O-methyl Nucleotide
  modified_base 1: mod_base = OTHER; note = 5prime-vinylphosphonate linked to uracil
tggaactgagcacttgtacagga

SEQ ID NO: 113 - RNA, 23 nt, synthetic construct
  source 1..23: mol_type = other RNA
  modified_base 1: mod_base = OTHER; note = 2prime-O-methyl Nucleotide
  modified_base 1..2: mod_base = OTHER; note = Phosphorothioate Linkage
  modified_base 2: mod_base = OTHER; note = 2prime Fluoro Nucleotide
  modified_base 2..3: mod_base = OTHER; note = Phosphorothioate Linkage
  modified_base 3: mod_base = OTHER; note = 2prime-O-methyl Nucleotide
  modified_base 4: mod_base = OTHER; note = 2prime-O-methyl Nucleotide
  modified_base 5: mod_base = OTHER; note = 2prime Fluoro Nucleotide
  modified_base 6: mod_base = OTHER; note = 2prime-O-methyl Nucleotide
  modified_base 7: mod_base = OTHER; note = 2prime-O-methyl Nucleotide
  modified_base 8: mod_base = OTHER; note = 2prime Fluoro Nucleotide
  modified_base 9: mod_base = OTHER; note = 2prime-O-methyl Nucleotide
  modified_base 10: mod_base = OTHER; note = 2prime-O-methyl Nucleotide
  modified_base 11: mod_base = OTHER; note = 2prime-O-methyl Nucleotide
  modified_base 12: mod_base = OTHER; note = 2prime-O-methyl Nucleotide
  modified_base 13: mod_base = OTHER; note = 2prime-O-methyl Nucleotide
  modified_base 14: mod_base = OTHER; note = 2prime Fluoro Nucleotide
  modified_base 15: mod_base = OTHER; note = 2prime-O-methyl Nucleotide
  modified_base 16: mod_base = OTHER; note = 2prime Fluoro Nucleotide
  modified_base 17: mod_base = OTHER; note = 2prime-O-methyl Nucleotide
  modified_base 18: mod_base = OTHER; note = 2prime-O-methyl Nucleotide
  modified_base 19: mod_base = OTHER; note = 2prime-O-methyl Nucleotide
  modified_base 20: mod_base = OTHER; note = 2prime-O-methyl Nucleotide
  modified_base 21: mod_base = OTHER; note = 2prime-O-methyl Nucleotide
  modified_base 21..22: mod_base = OTHER; note = Phosphorothioate Linkage
  modified_base 22: mod_base = OTHER; note = 2prime-O-methyl Nucleotide
  modified_base 22..23: mod_base = OTHER; note = Phosphorothioate Linkage
  modified_base 23: mod_base = OTHER; note = 2prime-O-methyl Nucleotide
  modified_base 1: mod_base = OTHER; note = 5prime-vinylphosphonate linked to uracil
tggaactgagcacttgtacagga

SEQ ID NO: 114 - RNA, 23 nt, synthetic construct
  source 1..23: mol_type = other RNA
  modified_base 1: mod_base = OTHER; note = 2prime-O-methyl Nucleotide
  modified_base 1..2: mod_base = OTHER; note = Phosphorothioate Linkage
  modified_base 2: mod_base = OTHER; note = 2prime Fluoro Nucleotide
  modified_base 2..3: mod_base = OTHER; note = Phosphorothioate Linkage
  modified_base 3: mod_base = OTHER; note = 2prime-O-methyl Nucleotide
  modified_base 4: mod_base = OTHER; note = 2prime Fluoro Nucleotide
  modified_base 5: mod_base = OTHER; note = 2prime-O-methyl Nucleotide
  modified_base 6: mod_base = OTHER; note = 2prime Fluoro Nucleotide
  modified_base 7: mod_base = OTHER; note = 2prime Fluoro Nucleotide
  modified_base 8: mod_base = OTHER; note = 2prime-O-methyl Nucleotide
  modified_base 9: mod_base = OTHER; note = 2prime Fluoro Nucleotide
  modified_base 10: mod_base = OTHER; note = 2prime-O-methyl Nucleotide
  modified_base 11: mod_base = OTHER; note = 2prime-O-methyl Nucleotide
  modified_base 12: mod_base = OTHER; note = 2prime-O-methyl Nucleotide
  modified_base 13: mod_base = OTHER; note = 2prime-O-methyl Nucleotide
  modified_base 14: mod_base = OTHER; note = 2prime Fluoro Nucleotide
  modified_base 15: mod_base = OTHER; note = 2prime-O-methyl Nucleotide
  modified_base 16: mod_base = OTHER; note = 2prime Fluoro Nucleotide
  modified_base 17: mod_base = OTHER; note = 2prime-O-methyl Nucleotide
  modified_base 18: mod_base = OTHER; note = 2prime-O-methyl Nucleotide
  modified_base 19: mod_base = OTHER; note = 2prime-O-methyl Nucleotide
  modified_base 20: mod_base = OTHER; note = 2prime-O-methyl Nucleotide
  modified_base 21: mod_base = OTHER; note = 2prime-O-methyl Nucleotide
  modified_base 21..22: mod_base = OTHER; note = Phosphorothioate Linkage
  modified_base 22: mod_base = OTHER; note = 2prime-O-methyl Nucleotide
  modified_base 22..23: mod_base = OTHER; note = Phosphorothioate Linkage
  modified_base 23: mod_base = OTHER; note = 2prime-O-methyl Nucleotide
  modified_base 1: mod_base = OTHER; note = 5prime-vinylphosphonate linked to uracil
tggaactgagcacttgtacagga

SEQ ID NO: 115 - RNA, 23 nt, synthetic construct
  source 1..23: mol_type = other RNA
  modified_base 1: mod_base = OTHER; note = 2prime-O-methyl Nucleotide
  modified_base 1..2: mod_base = OTHER; note = Phosphorothioate Linkage
  modified_base 2: mod_base = OTHER; note = 2prime Fluoro Nucleotide
  modified_base 2..3: mod_base = OTHER; note = Phosphorothioate Linkage
  modified_base 3: mod_base = OTHER; note = 2prime-O-methyl Nucleotide
  modified_base 4: mod_base = OTHER; note = 2prime-O-methyl Nucleotide
  modified_base 5: mod_base = OTHER; note = 2prime Fluoro Nucleotide
  modified_base 6: mod_base = OTHER; note = 2prime Fluoro Nucleotide
  modified_base 7: mod_base = OTHER; note = 2prime Fluoro Nucleotide
  modified_base 8: mod_base = OTHER; note = 2prime Fluoro Nucleotide
  modified_base 9: mod_base = OTHER; note = 2prime-O-methyl Nucleotide
  modified_base 10: mod_base = OTHER; note = 2prime-O-methyl Nucleotide
  modified_base 11: mod_base = OTHER; note = 2prime-O-methyl Nucleotide
  modified_base 12: mod_base = OTHER; note = 2prime-O-methyl Nucleotide
  modified_base 13: mod_base = OTHER; note = 2prime-O-methyl Nucleotide
  modified_base 14: mod_base = OTHER; note = 2prime Fluoro Nucleotide
  modified_base 15: mod_base = OTHER; note = 2prime-O-methyl Nucleotide
  modified_base 16: mod_base = OTHER; note = 2prime Fluoro Nucleotide
  modified_base 17: mod_base = OTHER; note = 2prime-O-methyl Nucleotide
  modified_base 18: mod_base = OTHER; note = 2prime-O-methyl Nucleotide
  modified_base 19: mod_base = OTHER; note = 2prime-O-methyl Nucleotide
  modified_base 20: mod_base = OTHER; note = 2prime-O-methyl Nucleotide
  modified_base 21: mod_base = OTHER; note = 2prime-O-methyl Nucleotide
  modified_base 21..22: mod_base = OTHER; note = Phosphorothioate Linkage
  modified_base 22: mod_base = OTHER; note = 2prime-O-methyl Nucleotide
  modified_base 22..23: mod_base = OTHER; note = Phosphorothioate Linkage
  modified_base 23: mod_base = OTHER; note = 2prime-O-methyl Nucleotide
  modified_base 1: mod_base = OTHER; note = 5prime-vinylphosphonate linked to uracil
tggaactgagcacttgtacagga

SEQ ID NO: 116 - RNA, 23 nt, synthetic construct
  source 1..23: mol_type = other RNA
  modified_base 1: mod_base = OTHER; note = 2prime-O-methyl Nucleotide
  modified_base 1..2: mod_base = OTHER; note = Phosphorothioate Linkage
  modified_base 2: mod_base = OTHER; note = 2prime Fluoro Nucleotide
  modified_base 2..3: mod_base = OTHER; note = Phosphorothioate Linkage
  modified_base 3: mod_base = OTHER; note = 2prime-O-methyl Nucleotide
  modified_base 4: mod_base = OTHER; note = 2prime-O-methyl Nucleotide
  modified_base 5: mod_base = OTHER; note = 2prime-O-methyl Nucleotide
  modified_base 6: mod_base = OTHER; note = 2prime-O-methyl Nucleotide
  modified_base 7: mod_base = OTHER; note = 2prime-O-methyl Nucleotide
  modified_base 8: mod_base = OTHER; note = 2prime-O-methyl Nucleotide
  modified_base 9: mod_base = OTHER; note = 2prime-O-methyl Nucleotide
  modified_base 10: mod_base = OTHER; note = 2prime-O-methyl Nucleotide
  modified_base 11: mod_base = OTHER; note = 2prime-O-methyl Nucleotide
  modified_base 12: mod_base = OTHER; note = 2prime-O-methyl Nucleotide
  modified_base 13: mod_base = OTHER; note = 2prime-O-methyl Nucleotide
  modified_base 14: mod_base = OTHER; note = 2prime Fluoro Nucleotide
  modified_base 15: mod_base = OTHER; note = 2prime-O-methyl Nucleotide
  modified_base 16: mod_base = OTHER; note = 2prime Fluoro Nucleotide
  modified_base 17: mod_base = OTHER; note = 2prime-O-methyl Nucleotide
  modified_base 18: mod_base = OTHER; note = 2prime-O-methyl Nucleotide
  modified_base 19: mod_base = OTHER; note = 2prime-O-methyl Nucleotide
  modified_base 20: mod_base = OTHER; note = 2prime-O-methyl Nucleotide
  modified_base 21: mod_base = OTHER; note = 2prime-O-methyl Nucleotide
  modified_base 21..22: mod_base = OTHER; note = Phosphorothioate Linkage
  modified_base 22: mod_base = OTHER; note = 2prime-O-methyl Nucleotide
  modified_base 22..23: mod_base = OTHER; note = Phosphorothioate Linkage
  modified_base 23: mod_base = OTHER; note = 2prime-O-methyl Nucleotide
  modified_base 1: mod_base = OTHER; note = 5prime-vinylphosphonate linked to uracil
tggaactgagcacttgtacagga

SEQ ID NO: 117 - RNA, 23 nt, synthetic construct
  source 1..23: mol_type = other RNA
  modified_base 1: mod_base = OTHER; note = 2prime-O-methyl Nucleotide
  modified_base 1..2: mod_base = OTHER; note = Phosphorothioate Linkage
  modified_base 2: mod_base = OTHER; note = 2prime Fluoro Nucleotide
  modified_base 2..3: mod_base = OTHER; note = Phosphorothioate Linkage
  modified_base 3: mod_base = OTHER; note = 2prime-O-methyl Nucleotide
  modified_base 4: mod_base = OTHER; note = 2prime-O-methyl Nucleotide
  modified_base 5: mod_base = OTHER; note = 2prime Fluoro Nucleotide
  modified_base 6: mod_base = OTHER; note = 2prime-O-methyl Nucleotide
  modified_base 7: mod_base = OTHER; note = 2prime-O-methyl Nucleotide
  modified_base 8: mod_base = OTHER; note = 2prime Fluoro Nucleotide
  modified_base 9: mod_base = OTHER; note = 2prime-O-methyl Nucleotide
  modified_base 10: mod_base = OTHER; note = 2prime-O-methyl Nucleotide
  modified_base 11: mod_base = OTHER; note = 2prime-O-methyl Nucleotide
  modified_base 12: mod_base = OTHER; note = 2prime-O-methyl Nucleotide
  modified_base 13: mod_base = OTHER; note = 2prime-O-methyl Nucleotide
  modified_base 14: mod_base = OTHER; note = 2prime Fluoro Nucleotide
  modified_base 15: mod_base = OTHER; note = 2prime-O-methyl Nucleotide
  modified_base 16: mod_base = OTHER; note = 2prime Fluoro Nucleotide
  modified_base 17: mod_base = OTHER; note = 2prime-O-methyl Nucleotide
  modified_base 18: mod_base = OTHER; note = 2prime-O-methyl Nucleotide
  modified_base 19: mod_base = OTHER; note = 2prime-O-methyl Nucleotide
  modified_base 20: mod_base = OTHER; note = 2prime-O-methyl Nucleotide
  modified_base 21: mod_base = OTHER; note = 2prime-O-methyl Nucleotide
  modified_base 21..22: mod_base = OTHER; note = Phosphorothioate Linkage
  modified_base 22: mod_base = OTHER; note = 2prime-O-methyl Nucleotide
  modified_base 22..23: mod_base = OTHER; note = Phosphorothioate Linkage
  modified_base 23: mod_base = OTHER; note = 2prime-O-methyl Nucleotide
  modified_base 1: mod_base = OTHER; note = 5prime-vinylphosphonate linked to uracil
tggaactgagcacttgtacagga

SEQ ID NO: 118 - RNA, 23 nt, synthetic construct
  source 1..23: mol_type = other RNA
  modified_base 1: mod_base = OTHER; note = 2prime-O-methyl Nucleotide
  modified_base 1..2: mod_base = OTHER; note = Phosphorothioate Linkage
  modified_base 2: mod_base = OTHER; note = 2prime Fluoro Nucleotide
  modified_base 2..3: mod_base = OTHER; note = Phosphorothioate Linkage
  modified_base 3: mod_base = OTHER; note = 2prime-O-methyl Nucleotide
  modified_base 4: mod_base = OTHER; note = 2prime-O-methyl Nucleotide
  modified_base 5: mod_base = OTHER; note = 2prime Fluoro Nucleotide
  modified_base 6: mod_base = OTHER; note = 2prime-O-methyl Nucleotide
  modified_base 7: mod_base = OTHER; note = 2prime-O-methyl Nucleotide
  modified_base 8: mod_base = OTHER; note = 2prime-O-methyl Nucleotide
  modified_base 9: mod_base = OTHER; note = 2prime-O-methyl Nucleotide
  modified_base 10: mod_base = OTHER; note = 2prime-O-methyl Nucleotide
  modified_base 11: mod_base = OTHER; note = 2prime-O-methyl Nucleotide
  modified_base 12: mod_base = OTHER; note = 2prime-O-methyl Nucleotide
  modified_base 13: mod_base = OTHER; note = 2prime-O-methyl Nucleotide
  modified_base 14: mod_base = OTHER; note = 2prime Fluoro Nucleotide
  modified_base 15: mod_base = OTHER; note = 2prime-O-methyl Nucleotide
  modified_base 16: mod_base = OTHER; note = 2prime Fluoro Nucleotide
  modified_base 17: mod_base = OTHER; note = 2prime-O-methyl Nucleotide
  modified_base 18: mod_base = OTHER; note = 2prime-O-methyl Nucleotide
  modified_base 19: mod_base = OTHER; note = 2prime-O-methyl Nucleotide
  modified_base 20: mod_base = OTHER; note = 2prime-O-methyl Nucleotide
  modified_base 21: mod_base = OTHER; note = 2prime-O-methyl Nucleotide
  modified_base 21..22: mod_base = OTHER; note = Phosphorothioate Linkage
  modified_base 22: mod_base = OTHER; note = 2prime-O-methyl Nucleotide
  modified_base 22..23: mod_base = OTHER; note = Phosphorothioate Linkage
  modified_base 23: mod_base = OTHER; note = 2prime-O-methyl Nucleotide
  modified_base 1: mod_base = OTHER; note = 5prime-vinylphosphonate linked to uracil
tggaactgagcacttgtacagga

SEQ ID NO: 119 - RNA, 23 nt, synthetic construct
  source 1..23: mol_type = other RNA
  modified_base 1: mod_base = OTHER; note = 2prime-O-methyl Nucleotide
  modified_base 1..2: mod_base = OTHER; note = Phosphorothioate Linkage
  modified_base 2: mod_base = OTHER; note = 2prime Fluoro Nucleotide
  modified_base 2..3: mod_base = OTHER; note = Phosphorothioate Linkage
  modified_base 3: mod_base = OTHER; note = 2prime-O-methyl Nucleotide
  modified_base 4: mod_base = OTHER; note = 2prime-O-methyl Nucleotide
  modified_base 5: mod_base = OTHER; note = 2prime-O-methyl Nucleotide
  modified_base 6: mod_base = OTHER; note = 2prime Fluoro Nucleotide
  modified_base 7: mod_base = OTHER; note = 2prime-O-methyl Nucleotide
  modified_base 8: mod_base = OTHER; note = 2prime-O-methyl Nucleotide
  modified_base 9: mod_base = OTHER; note = 2prime-O-methyl Nucleotide
  modified_base 10: mod_base = OTHER; note = 2prime-O-methyl Nucleotide
  modified_base 11: mod_base = OTHER; note = 2prime-O-methyl Nucleotide
  modified_base 12: mod_base = OTHER; note = 2prime-O-methyl Nucleotide
  modified_base 13: mod_base = OTHER; note = 2prime-O-methyl Nucleotide
  modified_base 14: mod_base = OTHER; note = 2prime Fluoro Nucleotide
  modified_base 15: mod_base = OTHER; note = 2prime-O-methyl Nucleotide
  modified_base 16: mod_base = OTHER; note = 2prime Fluoro Nucleotide
  modified_base 17: mod_base = OTHER; note = 2prime-O-methyl Nucleotide
  modified_base 18: mod_base = OTHER; note = 2prime-O-methyl Nucleotide
  modified_base 19: mod_base = OTHER; note = 2prime-O-methyl Nucleotide
  modified_base 20: mod_base = OTHER; note = 2prime-O-methyl Nucleotide
  modified_base 21: mod_base = OTHER; note = 2prime-O-methyl Nucleotide
  modified_base 21..22: mod_base = OTHER; note = Phosphorothioate Linkage
  modified_base 22: mod_base = OTHER; note = 2prime-O-methyl Nucleotide
  modified_base 22..23: mod_base = OTHER; note = Phosphorothioate Linkage
  modified_base 23: mod_base = OTHER; note = 2prime-O-methyl Nucleotide
  modified_base 1: mod_base = OTHER; note = 5prime-vinylphosphonate linked to uracil
tggaactgagcacttgtacagga

SEQ ID NO: 120 - RNA, 23 nt, synthetic construct
  source 1..23: mol_type = other RNA
  modified_base 1: mod_base = OTHER; note = 2prime-O-methyl Nucleotide
  modified_base 1..2: mod_base = OTHER; note = Phosphorothioate Linkage
  modified_base 2: mod_base = OTHER; note = 2prime Fluoro Nucleotide
  modified_base 2..3: mod_base = OTHER; note = Phosphorothioate Linkage
  modified_base 3: mod_base = OTHER; note = 2prime-O-methyl Nucleotide
  modified_base 4: mod_base = OTHER; note = 2prime-O-methyl Nucleotide
  modified_base 5: mod_base = OTHER; note = 2prime-O-methyl Nucleotide
  modified_base 6: mod_base = OTHER; note = 2prime Fluoro Nucleotide
  modified_base 7: mod_base = OTHER; note = 2prime-O-methyl Nucleotide
  modified_base 8: mod_base = OTHER; note = 2prime-O-methyl Nucleotide
  modified_base 9: mod_base = OTHER; note = 2prime-O-methyl Nucleotide
  modified_base 10: mod_base = OTHER; note = 2prime-O-methyl Nucleotide
  modified_base 11: mod_base = OTHER; note = 2prime-O-methyl Nucleotide
  modified_base 12: mod_base = OTHER; note = 2prime-O-methyl Nucleotide
  modified_base 13: mod_base = OTHER; note = 2prime-O-methyl Nucleotide
  modified_base 14: mod_base = OTHER; note = 2prime Fluoro Nucleotide
  modified_base 15: mod_base = OTHER; note = 2prime-O-methyl Nucleotide
  modified_base 16: mod_base = OTHER; note = 2prime Fluoro Nucleotide
  modified_base 17: mod_base = OTHER; note = 2prime-O-methyl Nucleotide
  modified_base 18: mod_base = OTHER; note = 2prime-O-methyl Nucleotide
  modified_base 19: mod_base = OTHER; note = 2prime-O-methyl Nucleotide
  modified_base 20: mod_base = OTHER; note = 2prime-O-methyl Nucleotide
  modified_base 21: mod_base = OTHER; note = 2prime-O-methyl Nucleotide
  modified_base 21..22: mod_base = OTHER; note = Phosphorothioate Linkage
  modified_base 22: mod_base = OTHER; note = 2prime-O-methyl Nucleotide
  modified_base 22..23: mod_base = OTHER; note = Phosphorothioate Linkage
  modified_base 23: mod_base = OTHER; note = 2prime-O-methyl Nucleotide
  modified_base 1: mod_base = OTHER; note = 5prime-vinylphosphonate linked to uracil
tggaactgagcacttgtacagga

SEQ ID NO: 121 - RNA, 23 nt, synthetic construct
  source 1..23: mol_type = other RNA
  modified_base 1: mod_base = OTHER; note = 2prime-O-methyl Nucleotide
  modified_base 1..2: mod_base = OTHER; note = Phosphorothioate Linkage
  modified_base 2: mod_base = OTHER; note = 2prime Fluoro Nucleotide
  modified_base 2..3: mod_base = OTHER; note = Phosphorothioate Linkage
  modified_base 3: mod_base = OTHER; note = 2prime-O-methyl Nucleotide
  modified_base 4: mod_base = OTHER; note = 2prime-O-methyl Nucleotide
  modified_base 5: mod_base = OTHER; note = 2prime-O-methyl Nucleotide
  modified_base 6: mod_base = OTHER; note = 2prime Fluoro Nucleotide
  modified_base 7: mod_base = OTHER; note = 2prime-O-methyl Nucleotide
  modified_base 8: mod_base = OTHER; note = 2prime-O-methyl Nucleotide
  modified_base 9: mod_base = OTHER; note = 2prime-O-methyl Nucleotide
  modified_base 10: mod_base = OTHER; note = 2prime-O-methyl Nucleotide
  modified_base 11: mod_base = OTHER; note = 2prime-O-methyl Nucleotide
  modified_base 12: mod_base = OTHER; note = 2prime-O-methyl Nucleotide
  modified_base 13: mod_base = OTHER; note = 2prime-O-methyl Nucleotide
  modified_base 14: mod_base = OTHER; note = 2prime Fluoro Nucleotide
  modified_base 15: mod_base = OTHER; note = 2prime-O-methyl Nucleotide
  modified_base 16: mod_base = OTHER; note = 2prime Fluoro Nucleotide
  modified_base 17: mod_base = OTHER; note = 2prime-O-methyl Nucleotide
  modified_base 18: mod_base = OTHER; note = 2prime-O-methyl Nucleotide
  modified_base 19: mod_base = OTHER; note = 2prime-O-methyl Nucleotide
  modified_base 20: mod_base = OTHER; note = 2prime-O-methyl Nucleotide
  modified_base 21: mod_base = OTHER; note = 2prime-O-methyl Nucleotide
  modified_base 21..22: mod_base = OTHER; note = Phosphorothioate Linkage
  modified_base 22: mod_base = OTHER; note = 2prime-O-methyl Nucleotide
  modified_base 22..23: mod_base = OTHER; note = Phosphorothioate Linkage
  modified_base 23: mod_base = OTHER; note = 2prime-O-methyl Nucleotide
  modified_base 1: mod_base = OTHER; note = 5prime-vinylphosphonate linked to uracil
tggaactgagcacttgtacagga

SEQ ID NO: 122 - RNA, 23 nt, synthetic construct
  source 1..23: mol_type = other RNA
  modified_base 1: mod_base = OTHER; note = 2prime-O-methyl Nucleotide
  modified_base 1..2: mod_base = OTHER; note = Phosphorothioate Linkage
  modified_base 2: mod_base = OTHER; note = 2prime Fluoro Nucleotide
  modified_base 2..3: mod_base = OTHER; note = Phosphorothioate Linkage
  modified_base 3: mod_base = OTHER; note = 2prime-O-methyl Nucleotide
  modified_base 4: mod_base = OTHER; note = 2prime-O-methyl Nucleotide
  modified_base 5: mod_base = OTHER; note = 2prime-O-methyl Nucleotide
  modified_base 6: mod_base = OTHER; note = 2prime Fluoro Nucleotide
  modified_base 7: mod_base = OTHER; note = 2prime-O-methyl Nucleotide
  modified_base 8: mod_base = OTHER; note = 2prime-O-methyl Nucleotide
  modified_base 9: mod_base = OTHER; note = 2prime-O-methyl Nucleotide
  modified_base 10: mod_base = OTHER; note = 2prime-O-methyl Nucleotide
  modified_base 11: mod_base = OTHER; note = 2prime-O-methyl Nucleotide
  modified_base 12: mod_base = OTHER; note = 2prime-O-methyl Nucleotide
  modified_base 13: mod_base = OTHER; note = 2prime-O-methyl Nucleotide
  modified_base 14: mod_base = OTHER; note = 2prime Fluoro Nucleotide
  modified_base 15: mod_base = OTHER; note = 2prime-O-methyl Nucleotide
  modified_base 16: mod_base = OTHER; note = 2prime Fluoro Nucleotide
  modified_base 17: mod_base = OTHER; note = 2prime-O-methyl Nucleotide
  modified_base 18: mod_base = OTHER; note = 2prime-O-methyl Nucleotide
  modified_base 19: mod_base = OTHER; note = 2prime-O-methyl Nucleotide
  modified_base 20: mod_base = OTHER; note = 2prime-O-methyl Nucleotide
  modified_base 21: mod_base = OTHER; note = 2prime-O-methyl Nucleotide
  modified_base 21..22: mod_base = OTHER; note = Phosphorothioate Linkage
  modified_base 22: mod_base = OTHER; note = 2prime-O-methyl Nucleotide
  modified_base 22..23: mod_base = OTHER; note = Phosphorothioate Linkage
  modified_base 23: mod_base = OTHER; note = 2prime-O-methyl Nucleotide
  modified_base 1: mod_base = OTHER; note = 5prime-vinylphosphonate linked to uracil
tggaactgagcacttgtacagga

SEQ ID NO: 123 - RNA, 23 nt, synthetic construct
  source 1..23: mol_type = other RNA
  modified_base 1: mod_base = OTHER; note = 2prime-O-methyl Nucleotide
  modified_base 1..2: mod_base = OTHER; note = Phosphorothioate Linkage
  modified_base 2: mod_base = OTHER; note = 2prime Fluoro Nucleotide
  modified_base 2..3: mod_base = OTHER; note = Phosphorothioate Linkage
  modified_base 3: mod_base = OTHER; note = 2prime-O-methyl Nucleotide
  modified_base 4: mod_base = OTHER; note = 2prime Fluoro Nucleotide
  modified_base 5: mod_base = OTHER; note = 2prime-O-methyl Nucleotide
  modified_base 6: mod_base = OTHER; note = 2prime-O-methyl Nucleotide
  modified_base 7: mod_base = OTHER; note = 2prime-O-methyl Nucleotide
  modified_base 8: mod_base = OTHER; note = 2prime-O-methyl Nucleotide
  modified_base 9: mod_base = OTHER; note = 2prime-O-methyl Nucleotide
  modified_base 10: mod_base = OTHER; note = 2prime-O-methyl Nucleotide
  modified_base 11: mod_base = OTHER; note = 2prime-O-methyl Nucleotide
  modified_base 12: mod_base = OTHER; note = 2prime-O-methyl Nucleotide
  modified_base 13: mod_base = OTHER; note = 2prime-O-methyl Nucleotide
  modified_base 14: mod_base = OTHER; note = 2prime Fluoro Nucleotide
  modified_base 15: mod_base = OTHER; note = 2prime-O-methyl Nucleotide
  modified_base 16: mod_base = OTHER; note = 2prime Fluoro Nucleotide
  modified_base 17: mod_base = OTHER; note = 2prime-O-methyl Nucleotide
  modified_base 18: mod_base = OTHER; note = 2prime-O-methyl Nucleotide
  modified_base 19: mod_base = OTHER; note = 2prime-O-methyl Nucleotide
  modified_base 20: mod_base = OTHER; note = 2prime-O-methyl Nucleotide
  modified_base 21: mod_base = OTHER; note = 2prime-O-methyl Nucleotide
  modified_base 21..22: mod_base = OTHER; note = Phosphorothioate Linkage
  modified_base 22: mod_base = OTHER; note = 2prime-O-methyl Nucleotide
  modified_base 22..23: mod_base = OTHER; note = Phosphorothioate Linkage
  modified_base 23: mod_base = OTHER; note = 2prime-O-methyl Nucleotide
  modified_base 1: mod_base = OTHER; note = 5prime-vinylphosphonate linked to uracil
tggaactgagcacttgtacagga

SEQ ID NO: 124 - RNA, 23 nt, synthetic construct
  source 1..23: mol_type = other RNA
  modified_base 1: mod_base = OTHER; note = 2prime-O-methyl Nucleotide
  modified_base 1..2: mod_base = OTHER; note = Phosphorothioate Linkage
  modified_base 2: mod_base = OTHER; note = 2prime Fluoro Nucleotide
  modified_base 2..3: mod_base = OTHER; note = Phosphorothioate Linkage
  modified_base 3: mod_base = OTHER; note = 2prime-O-methyl Nucleotide
  modified_base 4: mod_base = OTHER; note = 2prime-O-methyl Nucleotide
  modified_base 5: mod_base = OTHER; note = 2prime-O-methyl Nucleotide
  modified_base 6: mod_base = OTHER; note = 2prime Fluoro Nucleotide
  modified_base 7: mod_base = OTHER; note = 2prime-O-methyl Nucleotide
  modified_base 8: mod_base = OTHER; note = 2prime-O-methyl Nucleotide
  modified_base 9: mod_base = OTHER; note = 2prime-O-methyl Nucleotide
  modified_base 10: mod_base = OTHER; note = 2prime-O-methyl Nucleotide
  modified_base 11: mod_base = OTHER; note = 2prime-O-methyl Nucleotide
  modified_base 12: mod_base = OTHER; note = 2prime-O-methyl Nucleotide
  modified_base 13: mod_base = OTHER; note = 2prime-O-methyl Nucleotide
  modified_base 14: mod_base = OTHER; note = 2prime Fluoro Nucleotide
  modified_base 15: mod_base = OTHER; note = 2prime-O-methyl Nucleotide
  modified_base 16: mod_base = OTHER; note = 2prime Fluoro Nucleotide
  modified_base 17: mod_base = OTHER; note = 2prime-O-methyl Nucleotide
  modified_base 18: mod_base = OTHER; note = 2prime-O-methyl Nucleotide
  modified_base 19: mod_base = OTHER; note = 2prime-O-methyl Nucleotide
  modified_base 20: mod_base = OTHER; note = 2prime-O-methyl Nucleotide
  modified_base 21: mod_base = OTHER; note = 2prime-O-methyl Nucleotide
  modified_base 21..22: mod_base = OTHER; note = Phosphorothioate Linkage
  modified_base 22: mod_base = OTHER; note = 2prime-O-methyl Nucleotide
  modified_base 22..23: mod_base = OTHER; note = Phosphorothioate Linkage
  modified_base 23: mod_base = OTHER; note = 2prime-O-methyl Nucleotide
  modified_base 1: mod_base = OTHER; note = 5prime-vinylphosphonate linked to uracil
tggaactgagcacttgtacagga

SEQ ID NO: 125 - RNA, 23 nt, synthetic construct
  source 1..23: mol_type = other RNA
  modified_base 1: mod_base = OTHER; note = 2prime-O-methyl Nucleotide
  modified_base 1..2: mod_base = OTHER; note = Phosphorothioate Linkage
  modified_base 2: mod_base = OTHER; note = 2prime Fluoro Nucleotide
  modified_base 2..3: mod_base = OTHER; note = Phosphorothioate Linkage
  modified_base 3: mod_base = OTHER; note = 2prime-O-methyl Nucleotide
  modified_base 4: mod_base = OTHER; note = 2prime-O-methyl Nucleotide
  modified_base 5: mod_base = OTHER; note = 2prime-O-methyl Nucleotide
  modified_base 6: mod_base = OTHER; note = 2prime Fluoro Nucleotide
  modified_base 7: mod_base = OTHER; note = 2prime-O-methyl Nucleotide
  modified_base 8: mod_base = OTHER; note = 2prime-O-methyl Nucleotide
  modified_base 9: mod_base = OTHER; note = 2prime-O-methyl Nucleotide
  modified_base 10: mod_base = OTHER; note = 2prime-O-methyl Nucleotide
  modified_base 11: mod_base = OTHER; note = 2prime-O-methyl Nucleotide
  modified_base 12: mod_base = OTHER; note = 2prime-O-methyl Nucleotide
  modified_base 13: mod_base = OTHER; note = 2prime-O-methyl Nucleotide
  modified_base 14: mod_base = OTHER; note = 2prime Fluoro Nucleotide
  modified_base 15: mod_base = OTHER; note = 2prime-O-methyl Nucleotide
  modified_base 16: mod_base = OTHER; note = 2prime Fluoro Nucleotide
  modified_base 17: mod_base = OTHER; note = 2prime-O-methyl Nucleotide
  modified_base 18: mod_base = OTHER; note = 2prime-O-methyl Nucleotide
  modified_base 19: mod_base = OTHER; note = 2prime-O-methyl Nucleotide
  modified_base 20: mod_base = OTHER; note = 2prime-O-methyl Nucleotide
  modified_base 21: mod_base = OTHER; note = 2prime-O-methyl Nucleotide
  modified_base 21..22: mod_base = OTHER; note = Phosphorothioate Linkage
  modified_base 22: mod_base = OTHER; note = 2prime-O-methyl Nucleotide
  modified_base 22..23: mod_base = OTHER; note = Phosphorothioate Linkage
  modified_base 23: mod_base = OTHER; note = 2prime-O-methyl Nucleotide
  modified_base 1: mod_base = OTHER; note = 5prime-vinylphosphonate linked to uracil
tggaactgagcacttgtacagga

SEQ ID NO: 126 - RNA, 23 nt, synthetic construct
  source 1..23: mol_type = other RNA
  modified_base 1: mod_base = OTHER; note = 2prime-O-methyl Nucleotide
  modified_base 1..2: mod_base = OTHER; note = Phosphorothioate Linkage
  modified_base 2: mod_base = OTHER; note = 2prime Fluoro Nucleotide
  modified_base 2..3: mod_base = OTHER; note = Phosphorothioate Linkage
  modified_base 3: mod_base = OTHER; note = 2prime-O-methyl Nucleotide
  modified_base 4: mod_base = OTHER; note = 2prime Fluoro Nucleotide
  modified_base 5: mod_base = OTHER; note = 2prime-O-methyl Nucleotide
  modified_base 6: mod_base = OTHER; note = 2prime Fluoro Nucleotide
  modified_base 7: mod_base = OTHER; note = 2prime-O-methyl Nucleotide
  modified_base 8: mod_base = OTHER; note = 2prime Fluoro Nucleotide
  modified_base 9: mod_base = OTHER; note = 2prime-O-methyl Nucleotide
  modified_base 10: mod_base = OTHER; note = 2prime-O-methyl Nucleotide
  modified_base 11: mod_base = OTHER; note = 2prime-O-methyl Nucleotide
  modified_base 12: mod_base = OTHER; note = 2prime-O-methyl Nucleotide
  modified_base 13: mod_base = OTHER; note = 2prime-O-methyl Nucleotide
  modified_base 14: mod_base = OTHER; note = 2prime Fluoro Nucleotide
  modified_base 15: mod_base = OTHER; note = 2prime-O-methyl Nucleotide
  modified_base 16: mod_base = OTHER; note = 2prime Fluoro Nucleotide
  modified_base 17: mod_base = OTHER; note = 2prime-O-methyl Nucleotide
  modified_base 18: mod_base = OTHER; note = 2prime-O-methyl Nucleotide
  modified_base 19: mod_base = OTHER; note = 2prime-O-methyl Nucleotide
  modified_base 20: mod_base = OTHER; note = 2prime-O-methyl Nucleotide
  modified_base 21: mod_base = OTHER; note = 2prime-O-methyl Nucleotide
  modified_base 21..22: mod_base = OTHER; note = Phosphorothioate Linkage
  modified_base 22: mod_base = OTHER; note = 2prime-O-methyl Nucleotide
  modified_base 22..23: mod_base = OTHER; note = Phosphorothioate Linkage
  modified_base 23: mod_base = OTHER; note = 2prime-O-methyl Nucleotide
  modified_base 1: mod_base = OTHER; note = 5prime-vinylphosphonate linked to uracil
tggaactgagcacttgtacagga

SEQ ID NO: 127 - RNA, 23 nt, synthetic construct
  source 1..23: mol_type = other RNA
  modified_base 1: mod_base = OTHER; note = 2prime-O-methyl Nucleotide
  modified_base 1..2: mod_base = OTHER; note = Phosphorothioate Linkage
  modified_base 2: mod_base = OTHER; note = 2prime Fluoro Nucleotide
  modified_base 2..3: mod_base = OTHER; note = Phosphorothioate Linkage
  modified_base 3: mod_base = OTHER; note = 2prime-O-methyl Nucleotide
  modified_base 4: mod_base = OTHER; note = 2prime-O-methyl Nucleotide
  modified_base 5: mod_base = OTHER; note = 2prime-O-methyl Nucleotide
  modified_base 6: mod_base = OTHER; note = 2prime Fluoro Nucleotide
  modified_base 7: mod_base = OTHER; note = 2prime-O-methyl Nucleotide
  modified_base 8: mod_base = OTHER; note = 2prime Fluoro Nucleotide
  modified_base 9: mod_base = OTHER; note = 2prime-O-methyl Nucleotide
  modified_base 10: mod_base = OTHER; note = 2prime-O-methyl Nucleotide
  modified_base 11: mod_base = OTHER; note = 2prime-O-methyl Nucleotide
  modified_base 12: mod_base = OTHER; note = 2prime-O-methyl Nucleotide
  modified_base 13: mod_base = OTHER; note = 2prime-O-methyl Nucleotide
  modified_base 14: mod_base = OTHER; note = 2prime Fluoro Nucleotide
  modified_base 15: mod_base = OTHER; note = 2prime-O-methyl Nucleotide
  modified_base 16: mod_base = OTHER; note = 2prime Fluoro Nucleotide
  modified_base 17: mod_base = OTHER; note = 2prime-O-methyl Nucleotide
  modified_base 18: mod_base = OTHER; note = 2prime-O-methyl Nucleotide
  modified_base 19: mod_base = OTHER; note = 2prime-O-methyl Nucleotide
  modified_base 20: mod_base = OTHER; note = 2prime-O-methyl Nucleotide
  modified_base 21: mod_base = OTHER; note = 2prime-O-methyl Nucleotide
  modified_base 21..22: mod_base = OTHER; note = Phosphorothioate Linkage
  modified_base 22: mod_base = OTHER; note = 2prime-O-methyl Nucleotide
  modified_base 22..23: mod_base = OTHER; note = Phosphorothioate Linkage
  modified_base 23: mod_base = OTHER; note = 2prime-O-methyl Nucleotide
  modified_base 1: mod_base = OTHER; note = 5prime-vinylphosphonate linked to uracil
tggaactgagcacttgtacagga

SEQ ID NO: 128 - RNA, 23 nt, synthetic construct
  source 1..23: mol_type = other RNA
  modified_base 1: mod_base = OTHER; note = 2prime-O-methyl Nucleotide
  modified_base 1..2: mod_base = OTHER; note = Phosphorothioate Linkage
  modified_base 2: mod_base = OTHER; note = 2prime Fluoro Nucleotide
  modified_base 2..3: mod_base = OTHER; note = Phosphorothioate Linkage
  modified_base 3: mod_base = OTHER; note = 2prime-O-methyl Nucleotide
  modified_base 4: mod_base = OTHER; note = 2prime-O-methyl Nucleotide
  modified_base 5: mod_base = OTHER; note = 2prime-O-methyl Nucleotide
  modified_base 6: mod_base = OTHER; note = 2prime Fluoro Nucleotide
  modified_base 7: mod_base = OTHER; note = 2prime-O-methyl Nucleotide
  modified_base 8: mod_base = OTHER; note = 2prime-O-methyl Nucleotide
  modified_base 9: mod_base = OTHER; note = 2prime-O-methyl Nucleotide
  modified_base 10: mod_base = OTHER; note = 2prime-O-methyl Nucleotide
  modified_base 11: mod_base = OTHER; note = 2prime-O-methyl Nucleotide
  modified_base 12: mod_base = OTHER; note = 2prime-O-methyl Nucleotide
  modified_base 13: mod_base = OTHER; note = 2prime-O-methyl Nucleotide
  modified_base 14: mod_base = OTHER; note = 2prime Fluoro Nucleotide
  modified_base 15: mod_base = OTHER; note = 2prime-O-methyl Nucleotide
  modified_base 16: mod_base = OTHER; note = 2prime Fluoro Nucleotide
  modified_base 17: mod_base = OTHER; note = 2prime-O-methyl Nucleotide
  modified_base 18: mod_base = OTHER; note = 2prime-O-methyl Nucleotide
  modified_base 19: mod_base = OTHER; note = 2prime-O-methyl Nucleotide
  modified_base 20: mod_base = OTHER; note = 2prime-O-methyl Nucleotide
  modified_base 21: mod_base = OTHER; note = 2prime-O-methyl Nucleotide
  modified_base 21..22: mod_base = OTHER; note = Phosphorothioate Linkage
  modified_base 22: mod_base = OTHER; note = 2prime-O-methyl Nucleotide
  modified_base 22..23: mod_base = OTHER; note = Phosphorothioate Linkage
  modified_base 23: mod_base = OTHER; note = 2prime-O-methyl Nucleotide
  modified_base 1: mod_base = OTHER; note = 5prime-vinylphosphonate linked to uracil
tggaactgagcacttgtacagga

SEQ ID NO: 129 - RNA, 23 nt, synthetic construct
  source 1..23: mol_type = other RNA
  modified_base 1: mod_base = OTHER; note = 2prime-O-methyl Nucleotide
  modified_base 1..2: mod_base = OTHER; note = Phosphorothioate Linkage
  modified_base 2: mod_base = OTHER; note = 2prime Fluoro Nucleotide
  modified_base 2..3: mod_base = OTHER; note = Phosphorothioate Linkage
  modified_base 3: mod_base = OTHER; note = 2prime-O-methyl Nucleotide
  modified_base 4: mod_base = OTHER; note = 2prime Fluoro Nucleotide
  modified_base 5: mod_base = OTHER; note = 2prime-O-methyl Nucleotide
  modified_base 6: mod_base = OTHER; note = 2prime Fluoro Nucleotide
  modified_base 7: mod_base = OTHER; note = 2prime-O-methyl Nucleotide
  modified_base 8: mod_base = OTHER; note = 2prime Fluoro Nucleotide
  modified_base 9: mod_base = OTHER; note = 2prime-O-methyl Nucleotide
  modified_base 10: mod_base = OTHER; note = 2prime Fluoro Nucleotide
  modified_base 11: mod_base = OTHER; note = 2prime-O-methyl Nucleotide
  modified_base 12: mod_base = OTHER; note = 2prime-O-methyl Nucleotide
  modified_base 13: mod_base = OTHER; note = 2prime-O-methyl Nucleotide
  modified_base 14: mod_base = OTHER; note = 2prime Fluoro Nucleotide
  modified_base 15: mod_base = OTHER; note = 2prime-O-methyl Nucleotide
  modified_base 16: mod_base = OTHER; note = 2prime Fluoro Nucleotide
  modified_base 17: mod_base = OTHER; note = 2prime-O-methyl Nucleotide
  modified_base 18: mod_base = OTHER; note = 2prime Fluoro Nucleotide
  modified_base 19: mod_base = OTHER; note = 2prime-O-methyl Nucleotide
  modified_base 20: mod_base = OTHER; note = 2prime Fluoro Nucleotide
  modified_base 21: mod_base = OTHER; note = 2prime-O-methyl Nucleotide
  modified_base 21..22: mod_base = OTHER; note = Phosphorothioate Linkage
  modified_base 22: mod_base = OTHER; note = 2prime-O-methyl Nucleotide
  modified_base 22..23: mod_base = OTHER; note = Phosphorothioate Linkage
  modified_base 23: mod_base = OTHER; note = 2prime-O-methyl Nucleotide
  modified_base 1: mod_base = OTHER; note = 5prime-vinylphosphonate linked to uracil
tggaactgagcacttgtacagga

SEQ ID NO: 130 - RNA, 23 nt, synthetic construct
  source 1..23: mol_type = other RNA
  modified_base 1: mod_base = OTHER; note = 2prime-O-methyl Nucleotide
  modified_base 1..2: mod_base = OTHER; note = Phosphorothioate Linkage
  modified_base 2: mod_base = OTHER; note = 2prime Fluoro Nucleotide
  modified_base 2..3: mod_base = OTHER; note = Phosphorothioate Linkage
  modified_base 3: mod_base = OTHER; note = 2prime-O-methyl Nucleotide
  modified_base 4: mod_base = OTHER; note = 2prime-O-methyl Nucleotide
  modified_base 5: mod_base = OTHER; note = 2prime Fluoro Nucleotide
  modified_base 6: mod_base = OTHER; note = 2prime-O-methyl Nucleotide
  modified_base 7: mod_base = OTHER; note = 2prime-O-methyl Nucleotide
  modified_base 8: mod_base = OTHER; note = 2prime Fluoro Nucleotide
  modified_base 9: mod_base = OTHER; note = 2prime-O-methyl Nucleotide
  modified_base 10: mod_base = OTHER; note = 2prime-O-methyl Nucleotide
  modified_base 11: mod_base = OTHER; note = 2prime-O-methyl Nucleotide
  modified_base 12: mod_base = OTHER; note = 2prime-O-methyl Nucleotide
  modified_base 13: mod_base = OTHER; note = 2prime-O-methyl Nucleotide
  modified_base 14: mod_base = OTHER; note = 2prime Fluoro Nucleotide
  modified_base 15: mod_base = OTHER; note = 2prime-O-methyl Nucleotide
  modified_base 16: mod_base = OTHER; note = 2prime Fluoro Nucleotide
  modified_base 17: mod_base = OTHER; note = 2prime-O-methyl Nucleotide
  modified_base 18: mod_base = OTHER; note = 2prime-O-methyl Nucleotide
  modified_base 19: mod_base = OTHER; note = 2prime-O-methyl Nucleotide
  modified_base 20: mod_base = OTHER; note = 2prime-O-methyl Nucleotide
  modified_base 21: mod_base = OTHER; note = 2prime-O-methyl Nucleotide
  modified_base 21..22: mod_base = OTHER; note = Phosphorothioate Linkage
  modified_base 22: mod_base = OTHER; note = 2prime-O-methyl Nucleotide
  modified_base 22..23: mod_base = OTHER; note = Phosphorothioate Linkage
  modified_base 23: mod_base = OTHER; note = 2prime-O-methyl Nucleotide
  modified_base 1: mod_base = OTHER; note = 5prime-vinylphosphonate linked to uracil
tggaactgagcacttgtacagga

SEQ ID NO: 131 - RNA, 23 nt, synthetic construct
  source 1..23: mol_type = other RNA
  modified_base 1: mod_base = OTHER; note = 2prime-O-methyl Nucleotide
  modified_base 1..2: mod_base = OTHER; note = Phosphorothioate Linkage
  modified_base 2: mod_base = OTHER; note = 2prime Fluoro Nucleotide
  modified_base 2..3: mod_base = OTHER; note = Phosphorothioate Linkage
  modified_base 3: mod_base = OTHER; note = 2prime-O-methyl Nucleotide
  modified_base 4: mod_base = OTHER; note = 2prime-O-methyl Nucleotide
  modified_base 5: mod_base = OTHER; note = 2prime Fluoro Nucleotide
  modified_base 6: mod_base = OTHER; note = 2prime-O-methyl Nucleotide
  modified_base 7: mod_base = OTHER; note = 2prime-O-methyl Nucleotide
  modified_base 8: mod_base = OTHER; note = 2prime Fluoro Nucleotide
  modified_base 9: mod_base = OTHER; note = 2prime-O-methyl Nucleotide
  modified_base 10: mod_base = OTHER; note = 2prime-O-methyl Nucleotide
  modified_base 11: mod_base = OTHER; note = 2prime-O-methyl Nucleotide
  modified_base 12: mod_base = OTHER; note = 2prime-O-methyl Nucleotide
  modified_base 13: mod_base = OTHER; note = 2prime-O-methyl Nucleotide
  modified_base 14: mod_base = OTHER; note = 2prime Fluoro Nucleotide
  modified_base 15: mod_base = OTHER; note = 2prime-O-methyl Nucleotide
  modified_base 16: mod_base = OTHER; note = 2prime Fluoro Nucleotide
  modified_base 17: mod_base = OTHER; note = 2prime-O-methyl Nucleotide
  modified_base 18: mod_base = OTHER; note = 2prime-O-methyl Nucleotide
  modified_base 19: mod_base = OTHER; note = 2prime-O-methyl Nucleotide
  modified_base 20: mod_base = OTHER; note = 2prime-O-methyl Nucleotide
  modified_base 21: mod_base = OTHER; note = 2prime-O-methyl Nucleotide
  modified_base 21..22: mod_base = OTHER; note = Phosphorothioate Linkage
  modified_base 22: mod_base = OTHER; note = 2prime-O-methyl Nucleotide
  modified_base 22..23: mod_base = OTHER; note = Phosphorothioate Linkage
  modified_base 23: mod_base = OTHER; note = 2prime-O-methyl Nucleotide
  modified_base 1: mod_base = OTHER; note = 5prime-vinylphosphonate linked to uracil
tggaactgagcacttgtacagga

SEQ ID NO: 132 - RNA, 23 nt, synthetic construct
  source 1..23: mol_type = other RNA
  modified_base 1: mod_base = OTHER; note = 2prime-O-methyl Nucleotide
  modified_base 1..2: mod_base = OTHER; note = Phosphorothioate Linkage
  modified_base 2: mod_base = OTHER; note = 2prime Fluoro Nucleotide
  modified_base 2..3: mod_base = OTHER; note = Phosphorothioate Linkage
  modified_base 3: mod_base = OTHER; note = 2prime-O-methyl Nucleotide
  modified_base 4: mod_base = OTHER; note = 2prime-O-methyl Nucleotide
  modified_base 5: mod_base = OTHER; note = 2prime Fluoro Nucleotide
  modified_base 6: mod_base = OTHER; note = 2prime-O-methyl Nucleotide
  modified_base 7: mod_base = OTHER; note = 2prime-O-methyl Nucleotide
  modified_base 8: mod_base = OTHER; note = 2prime Fluoro Nucleotide
  modified_base 9: mod_base = OTHER; note = 2prime-O-methyl Nucleotide
  modified_base 10: mod_base = OTHER; note = 2prime-O-methyl Nucleotide
  modified_base 11: mod_base = OTHER; note = 2prime-O-methyl Nucleotide
  modified_base 12: mod_base = OTHER; note = 2prime-O-methyl Nucleotide
  modified_base 13: mod_base = OTHER; note = 2prime-O-methyl Nucleotide
  modified_base 14: mod_base = OTHER; note = 2prime Fluoro Nucleotide
  modified_base 15: mod_base = OTHER; note = 2prime-O-methyl Nucleotide
  modified_base 16: mod_base = OTHER; note = 2prime Fluoro Nucleotide
  modified_base 17: mod_base = OTHER; note = 2prime-O-methyl Nucleotide
  modified_base 18: mod_base = OTHER; note = 2prime-O-methyl Nucleotide
  modified_base 19: mod_base = OTHER; note = 2prime-O-methyl Nucleotide
  modified_base 20: mod_base = OTHER; note = 2prime-O-methyl Nucleotide
  modified_base 21: mod_base = OTHER; note = 2prime-O-methyl Nucleotide
  modified_base 21..22: mod_base = OTHER; note = Phosphorothioate Linkage
  modified_base 22: mod_base = OTHER; note = 2prime-O-methyl Nucleotide
  modified_base 22..23: mod_base = OTHER; note = Phosphorothioate Linkage
  modified_base 23: mod_base = OTHER; note = 2prime-O-methyl Nucleotide
  modified_base 1: mod_base = OTHER; note = 5prime-vinylphosphonate linked to uracil
tggaactgagcacttgtacagga

SEQ ID NO: 133 - RNA, 23 nt, synthetic construct
  source 1..23: mol_type = other RNA
  modified_base 1: mod_base = OTHER; note = 2prime-O-methyl Nucleotide
  modified_base 1..2: mod_base = OTHER; note = Phosphorothioate Linkage
  modified_base 2: mod_base = OTHER; note = 2prime Fluoro Nucleotide
  modified_base 2..3: mod_base = OTHER; note = Phosphorothioate Linkage
  modified_base 3: mod_base = OTHER; note = 2prime-O-methyl Nucleotide
  modified_base 4: mod_base = OTHER; note = 2prime-O-methyl Nucleotide
  modified_base 5: mod_base = OTHER; note = 2prime-O-methyl Nucleotide
  modified_base 6: mod_base = OTHER; note = 2prime Fluoro Nucleotide
  modified_base 7: mod_base = OTHER; note = 2prime-O-methyl Nucleotide
  modified_base 8: mod_base = OTHER; note = 2prime-O-methyl Nucleotide
  modified_base 9: mod_base = OTHER; note = 2prime-O-methyl Nucleotide
  modified_base 10: mod_base = OTHER; note = 2prime-O-methyl Nucleotide
  modified_base 11: mod_base = OTHER; note = 2prime-O-methyl Nucleotide
  modified_base 12: mod_base = OTHER; note = 2prime-O-methyl Nucleotide
  modified_base 13: mod_base = OTHER; note = 2prime-O-methyl Nucleotide
  modified_base 14: mod_base = OTHER; note = 2prime Fluoro Nucleotide
  modified_base 15: mod_base = OTHER; note = 2prime-O-methyl Nucleotide
  modified_base 16: mod_base = OTHER; note = 2prime Fluoro Nucleotide
  modified_base 17: mod_base = OTHER; note = 2prime-O-methyl Nucleotide
  modified_base 18: mod_base = OTHER; note = 2prime-O-methyl Nucleotide
  modified_base 19: mod_base = OTHER; note = 2prime-O-methyl Nucleotide
  modified_base 20: mod_base = OTHER; note = 2prime-O-methyl Nucleotide
  modified_base 21: mod_base = OTHER; note = 2prime-O-methyl Nucleotide
  modified_base 21..22: mod_base = OTHER; note = Phosphorothioate Linkage
  modified_base 22: mod_base = OTHER; note = 2prime-O-methyl Nucleotide
  modified_base 22..23: mod_base = OTHER; note = Phosphorothioate Linkage
  modified_base 23: mod_base = OTHER; note = 2prime-O-methyl Nucleotide
  modified_base 1: mod_base = OTHER; note = 5prime-vinylphosphonate linked to uracil
tggaactgagcacttgtacagga

SEQ ID NO: 134 - RNA, 23 nt, synthetic construct
  source 1..23: mol_type = other RNA
  modified_base 1: mod_base = OTHER; note = 2prime-O-methyl Nucleotide
  modified_base 1..2: mod_base = OTHER; note = Phosphorothioate Linkage
  modified_base 2: mod_base = OTHER; note = 2prime Fluoro Nucleotide
  modified_base 2..3: mod_base = OTHER; note = Phosphorothioate Linkage
  modified_base 3: mod_base = OTHER; note = 2prime-O-methyl Nucleotide
  modified_base 4: mod_base = OTHER; note = 2prime-O-methyl Nucleotide
  modified_base 5: mod_base = OTHER; note = 2prime-O-methyl Nucleotide
  modified_base 6: mod_base = OTHER; note = 2prime Fluoro Nucleotide
  modified_base 7: mod_base = OTHER; note = 2prime-O-methyl Nucleotide
  modified_base 8: mod_base = OTHER; note = 2prime-O-methyl Nucleotide
  modified_base 9: mod_base = OTHER; note = 2prime-O-methyl Nucleotide
  modified_base 10: mod_base = OTHER; note = 2prime-O-methyl Nucleotide
  modified_base 11: mod_base = OTHER; note = 2prime-O-methyl Nucleotide
  modified_base 12: mod_base = OTHER; note = 2prime-O-methyl Nucleotide
  modified_base 13: mod_base = OTHER; note = 2prime-O-methyl Nucleotide
  modified_base 14: mod_base = OTHER; note = 2prime Fluoro Nucleotide
  modified_base 15: mod_base = OTHER; note = 2prime-O-methyl Nucleotide
  modified_base 16: mod_base = OTHER; note = 2prime Fluoro Nucleotide
  modified_base 17: mod_base = OTHER; note = 2prime-O-methyl Nucleotide
  modified_base 18: mod_base = OTHER; note = 2prime-O-methyl Nucleotide
  modified_base 19: mod_base = OTHER; note = 2prime-O-methyl Nucleotide
  modified_base 20: mod_base = OTHER; note = 2prime-O-methyl Nucleotide
  modified_base 21: mod_base = OTHER; note = 2prime-O-methyl Nucleotide
  modified_base 21..22: mod_base = OTHER; note = Phosphorothioate Linkage
  modified_base 22: mod_base = OTHER; note = 2prime-O-methyl Nucleotide
  modified_base 22..23: mod_base = OTHER; note = Phosphorothioate Linkage
  modified_base 23: mod_base = OTHER; note = 2prime-O-methyl Nucleotide
  modified_base 1: mod_base = OTHER; note = 5prime-vinylphosphonate linked to uracil
tggaactgagcacttgtacatga

SEQ ID NO: 135 - RNA, 23 nt, synthetic construct
  source 1..23: mol_type = other RNA
  modified_base 1: mod_base = OTHER; note = 2prime-O-methyl Nucleotide
  modified_base 1..2: mod_base = OTHER; note = Phosphorothioate Linkage
  modified_base 2: mod_base = OTHER; note = 2prime Fluoro Nucleotide
  modified_base 2..3: mod_base = OTHER; note = Phosphorothioate Linkage
  modified_base 3: mod_base = OTHER; note = 2prime-O-methyl Nucleotide
  modified_base 4: mod_base = OTHER; note = 2prime-O-methyl Nucleotide
  modified_base 5: mod_base = OTHER; note = 2prime Fluoro Nucleotide
  modified_base 6: mod_base = OTHER; note = 2prime-O-methyl Nucleotide
  modified_base 7: mod_base = OTHER; note = 2prime-O-methyl Nucleotide
  modified_base 8: mod_base = OTHER; note = 2prime Fluoro Nucleotide
  modified_base 9: mod_base = OTHER; note = 2prime-O-methyl Nucleotide
  modified_base 10: mod_base = OTHER; note = 2prime-O-methyl Nucleotide
  modified_base 11: mod_base = OTHER; note = 2prime-O-methyl Nucleotide
  modified_base 12: mod_base = OTHER; note = 2prime-O-methyl Nucleotide
  modified_base 13: mod_base = OTHER; note = 2prime-O-methyl Nucleotide
  modified_base 14: mod_base = OTHER; note = 2prime Fluoro Nucleotide
  modified_base 15: mod_base = OTHER; note = 2prime-O-methyl Nucleotide
  modified_base 16: mod_base = OTHER; note = 2prime Fluoro Nucleotide
  modified_base 17: mod_base = OTHER; note = 2prime-O-methyl Nucleotide
  modified_base 18: mod_base = OTHER; note = 2prime-O-methyl Nucleotide
  modified_base 19: mod_base = OTHER; note = 2prime-O-methyl Nucleotide
  modified_base 20: mod_base = OTHER; note = 2prime-O-methyl Nucleotide
  modified_base 21: mod_base = OTHER; note = 2prime-O-methyl Nucleotide
  modified_base 21..22: mod_base = OTHER; note = Phosphorothioate Linkage
  modified_base 22: mod_base = OTHER; note = 2prime-O-methyl Nucleotide
  modified_base 22..23: mod_base = OTHER; note = Phosphorothioate Linkage
  modified_base 23: mod_base = OTHER; note = 2prime-O-methyl Nucleotide
  modified_base 1: mod_base = OTHER; note = 5prime-vinylphosphonate linked to uracil
tggaactgagcacttgtacagga

SEQ ID NO: 136 - RNA, 23 nt, synthetic construct
  source 1..23: mol_type = other RNA
  modified_base 1: mod_base = OTHER; note = 2prime-O-methyl Nucleotide
  modified_base 1..2: mod_base = OTHER; note = Phosphorothioate Linkage
  modified_base 2: mod_base = OTHER; note = 2prime Fluoro Nucleotide
  modified_base 2..3: mod_base = OTHER; note = Phosphorothioate Linkage
  modified_base 3: mod_base = OTHER; note = 2prime-O-methyl Nucleotide
  modified_base 4: mod_base = OTHER; note = 2prime-O-methyl Nucleotide
  modified_base 5: mod_base = OTHER; note = 2prime Fluoro Nucleotide
  modified_base 6: mod_base = OTHER; note = 2prime-O-methyl Nucleotide
  modified_base 7: mod_base = OTHER; note = 2prime-O-methyl Nucleotide
  modified_base 8: mod_base = OTHER; note = 2prime Fluoro Nucleotide
  modified_base 9: mod_base = OTHER; note = 2prime-O-methyl Nucleotide
  modified_base 10: mod_base = OTHER; note = 2prime-O-methyl Nucleotide
  modified_base 11: mod_base = OTHER; note = 2prime-O-methyl Nucleotide
  modified_base 12: mod_base = OTHER; note = 2prime-O-methyl Nucleotide
  modified_base 13: mod_base = OTHER; note = 2prime-O-methyl Nucleotide
  modified_base 14: mod_base = OTHER; note = 2prime Fluoro Nucleotide
  modified_base 15: mod_base = OTHER; note = 2prime-O-methyl Nucleotide
  modified_base 16: mod_base = OTHER; note = 2prime Fluoro Nucleotide
  modified_base 17: mod_base = OTHER; note = 2prime-O-methyl Nucleotide
  modified_base 18: mod_base = OTHER; note = 2prime-O-methyl Nucleotide
  modified_base 19: mod_base = OTHER; note = 2prime-O-methyl Nucleotide
  modified_base 20: mod_base = OTHER; note = 2prime-O-methyl Nucleotide
  modified_base 21: mod_base = OTHER; note = 2prime-O-methyl Nucleotide
  modified_base 21..22: mod_base = OTHER; note = Phosphorothioate Linkage
  modified_base 22: mod_base = OTHER; note = 2prime-O-methyl Nucleotide
  modified_base 22..23: mod_base = OTHER; note = Phosphorothioate Linkage
  modified_base 23: mod_base = OTHER; note = 2prime-O-methyl Nucleotide
  modified_base 1: mod_base = OTHER; note = 5prime-vinylphosphonate linked to uracil
tggaactgagcacttgtacagga

SEQ ID NO: 137 - RNA, 23 nt, synthetic construct
  source 1..23: mol_type = other RNA
  modified_base 1: mod_base = OTHER; note = 2prime-O-methyl Nucleotide
  modified_base 1..2: mod_base = OTHER; note = Phosphorothioate Linkage
  modified_base 2: mod_base = OTHER; note = 2prime Fluoro Nucleotide
  modified_base 2..3: mod_base = OTHER; note = Phosphorothioate Linkage
  modified_base 3: mod_base = OTHER; note = 2prime-O-methyl Nucleotide
  modified_base 4: mod_base = OTHER; note = 2prime-O-methyl Nucleotide
  modified_base 5: mod_base = OTHER; note = 2prime-O-methyl Nucleotide
  modified_base 6: mod_base = OTHER; note = 2prime-O-methyl Nucleotide
  modified_base 7: mod_base = OTHER; note = 2prime-O-methyl Nucleotide
  modified_base 8: mod_base = OTHER; note = 2prime-O-methyl Nucleotide
  modified_base 9: mod_base = OTHER; note = 2prime-O-methyl Nucleotide
  modified_base 10: mod_base = OTHER; note = 2prime-O-methyl Nucleotide
  modified_base 11: mod_base = OTHER; note = 2prime-O-methyl Nucleotide
  modified_base 12: mod_base = OTHER; note = 2prime-O-methyl Nucleotide
  modified_base 13: mod_base = OTHER; note = 2prime-O-methyl Nucleotide
  modified_base 14: mod_base = OTHER; note = 2prime Fluoro Nucleotide
  modified_base 15: mod_base = OTHER; note = 2prime-O-methyl Nucleotide
  modified_base 16: mod_base = OTHER; note = 2prime Fluoro Nucleotide
  modified_base 17: mod_base = OTHER; note = 2prime-O-methyl Nucleotide
  modified_base 18: mod_base = OTHER; note = 2prime-O-methyl Nucleotide
  modified_base 19: mod_base = OTHER; note = 2prime-O-methyl Nucleotide
  modified_base 20: mod_base = OTHER; note = 2prime-O-methyl Nucleotide
  modified_base 21: mod_base = OTHER; note = 2prime-O-methyl Nucleotide
  modified_base 21..22: mod_base = OTHER; note = Phosphorothioate Linkage
  modified_base 22: mod_base = OTHER; note = 2prime-O-methyl Nucleotide
  modified_base 22..23: mod_base = OTHER; note = Phosphorothioate Linkage
  modified_base 23: mod_base = OTHER; note = 2prime-O-methyl Nucleotide
  modified_base 1: mod_base = OTHER; note = 5prime-vinylphosphonate linked to uracil
tggaactgagcacttgtacagga

SEQ ID NO: 138 - RNA, 23 nt, synthetic construct
  source 1..23: mol_type = other RNA
  modified_base 1: mod_base = OTHER; note = 2prime-O-methyl Nucleotide
  modified_base 1..2: mod_base = OTHER; note = Phosphorothioate Linkage
  modified_base 2: mod_base = OTHER; note = 2prime Fluoro Nucleotide
  modified_base 2..3: mod_base = OTHER; note = Phosphorothioate Linkage
  modified_base 3: mod_base = OTHER; note = 2prime-O-methyl Nucleotide
  modified_base 4: mod_base = OTHER; note = 2prime-O-methyl Nucleotide
  modified_base 5: mod_base = OTHER; note = 2prime Fluoro Nucleotide
  modified_base 6: mod_base = OTHER; note = 2prime-O-methyl Nucleotide
  modified_base 7: mod_base = OTHER; note = 2prime Fluoro Nucleotide
  modified_base 8: mod_base = OTHER; note = 2prime-O-methyl Nucleotide
  modified_base 9: mod_base = OTHER; note = 2prime-O-methyl Nucleotide
  modified_base 10: mod_base = OTHER; note = 2prime-O-methyl Nucleotide
  modified_base 11: mod_base = OTHER; note = 2prime-O-methyl Nucleotide
  modified_base 12: mod_base = OTHER; note = 2prime-O-methyl Nucleotide
  modified_base 13: mod_base = OTHER; note = 2prime-O-methyl Nucleotide
  modified_base 14: mod_base = OTHER; note = 2prime Fluoro Nucleotide
  modified_base 15: mod_base = OTHER; note = 2prime-O-methyl Nucleotide
  modified_base 16: mod_base = OTHER; note = 2prime Fluoro Nucleotide
  modified_base 17: mod_base = OTHER; note = 2prime-O-methyl Nucleotide
  modified_base 18: mod_base = OTHER; note = 2prime-O-methyl Nucleotide
  modified_base 19: mod_base = OTHER; note = 2prime-O-methyl Nucleotide
  modified_base 20: mod_base = OTHER; note = 2prime-O-methyl Nucleotide
  modified_base 21: mod_base = OTHER; note = 2prime-O-methyl Nucleotide
  modified_base 21..22: mod_base = OTHER; note = Phosphorothioate Linkage
  modified_base 22: mod_base = OTHER; note = 2prime-O-methyl Nucleotide
  modified_base 22..23: mod_base = OTHER; note = Phosphorothioate Linkage
  modified_base 23: mod_base = OTHER; note = 2prime-O-methyl Nucleotide
  modified_base 1: mod_base = OTHER; note = 5prime-vinylphosphonate linked to uracil
tggaactgagcacttgtacagga

SEQ ID NO: 139 - RNA, 23 nt, synthetic construct
  source 1..23: mol_type = other RNA
  modified_base 1: mod_base = OTHER; note = 2prime-O-methyl Nucleotide
  modified_base 1..2: mod_base = OTHER; note = Phosphorothioate Linkage
  modified_base 2: mod_base = OTHER; note = 2prime Fluoro Nucleotide
  modified_base 2..3: mod_base = OTHER; note = Phosphorothioate Linkage
  modified_base 3: mod_base = OTHER; note = 2prime-O-methyl Nucleotide
  modified_base 4: mod_base = OTHER; note = 2prime-O-methyl Nucleotide
  modified_base 5: mod_base = OTHER; note = 2prime Fluoro Nucleotide
  modified_base 6: mod_base = OTHER; note = 2prime-O-methyl Nucleotide
  modified_base 7: mod_base = OTHER; note = 2prime-O-methyl Nucleotide
  modified_base 8: mod_base = OTHER; note = 2prime Fluoro Nucleotide
  modified_base 9: mod_base = OTHER; note = 2prime-O-methyl Nucleotide
  modified_base 10: mod_base = OTHER; note = 2prime-O-methyl Nucleotide
  modified_base 11: mod_base = OTHER; note = 2prime-O-methyl Nucleotide
  modified_base 12: mod_base = OTHER; note = 2prime-O-methyl Nucleotide
  modified_base 13: mod_base = OTHER; note = 2prime-O-methyl Nucleotide
  modified_base 14: mod_base = OTHER; note = 2prime Fluoro Nucleotide
  modified_base 15: mod_base = OTHER; note = 2prime-O-methyl Nucleotide
  modified_base 16: mod_base = OTHER; note = 2prime Fluoro Nucleotide
  modified_base 17: mod_base = OTHER; note = 2prime-O-methyl Nucleotide
  modified_base 18: mod_base = OTHER; note = 2prime-O-methyl Nucleotide
  modified_base 19: mod_base = OTHER; note = 2prime-O-methyl Nucleotide
  modified_base 20: mod_base = OTHER; note = 2prime-O-methyl Nucleotide
  modified_base 21: mod_base = OTHER; note = 2prime-O-methyl Nucleotide
  modified_base 21..22: mod_base = OTHER; note = Phosphorothioate Linkage
  modified_base 22: mod_base = OTHER; note = 2prime-O-methyl Nucleotide
  modified_base 22..23: mod_base = OTHER; note = Phosphorothioate Linkage
  modified_base 23: mod_base = OTHER; note = 2prime-O-methyl Nucleotide
  modified_base 1: mod_base = OTHER; note = 5prime-vinylphosphonate linked to uracil
tggaactgagcacttgtacagga

SEQ ID NO: 140 - RNA, 23 nt, synthetic construct
  source 1..23: mol_type = other RNA
  modified_base 1: mod_base = OTHER; note = 2prime-O-methyl Nucleotide
  modified_base 1..2: mod_base = OTHER; note = Phosphorothioate Linkage
  modified_base 2: mod_base = OTHER; note = 2prime Fluoro Nucleotide
  modified_base 2..3: mod_base = OTHER; note = Phosphorothioate Linkage
  modified_base 3: mod_base = OTHER; note = 2prime Fluoro Nucleotide
  modified_base 4: mod_base = OTHER; note = 2prime-O-methyl Nucleotide
  modified_base 5: mod_base = OTHER; note = 2prime-O-methyl Nucleotide
  modified_base 6: mod_base = OTHER; note = 2prime-O-methyl Nucleotide
  modified_base 7: mod_base = OTHER; note = 2prime Fluoro Nucleotide
  modified_base 8: mod_base = OTHER; note = 2prime-O-methyl Nucleotide
  modified_base 9: mod_base = OTHER; note = 2prime-O-methyl Nucleotide
  modified_base 10: mod_base = OTHER; note = 2prime-O-methyl Nucleotide
  modified_base 11: mod_base = OTHER; note = 2prime-O-methyl Nucleotide
  modified_base 12: mod_base = OTHER; note = 2prime-O-methyl Nucleotide
  modified_base 13: mod_base = OTHER; note = 2prime-O-methyl Nucleotide
  modified_base 14: mod_base = OTHER; note = 2prime Fluoro Nucleotide
  modified_base 15: mod_base = OTHER; note = 2prime-O-methyl Nucleotide
  modified_base 16: mod_base = OTHER; note = 2prime Fluoro Nucleotide
  modified_base 17: mod_base = OTHER; note = 2prime-O-methyl Nucleotide
  modified_base 18: mod_base = OTHER; note = 2prime-O-methyl Nucleotide
  modified_base 19: mod_base = OTHER; note = 2prime-O-methyl Nucleotide
  modified_base 20: mod_base = OTHER; note = 2prime-O-methyl Nucleotide
  modified_base 21: mod_base = OTHER; note = 2prime-O-methyl Nucleotide
  modified_base 21..22: mod_base = OTHER; note = Phosphorothioate Linkage
  modified_base 22: mod_base = OTHER; note = 2prime-O-methyl Nucleotide
  modified_base 22..23: mod_base = OTHER; note = Phosphorothioate Linkage
  modified_base 23: mod_base = OTHER; note = 2prime-O-methyl Nucleotide
  modified_base 1: mod_base = OTHER; note = 5prime-vinylphosphonate linked to uracil
tggaactgagcacttgtacagga

SEQ ID NO: 141 - RNA, 23 nt, synthetic construct
  source 1..23: mol_type = other RNA
  modified_base 1: mod_base = OTHER; note = 2prime-O-methyl Nucleotide
  modified_base 1..2: mod_base = OTHER; note = Phosphorothioate Linkage
  modified_base 2: mod_base = OTHER; note = 2prime Fluoro Nucleotide
  modified_base 2..3: mod_base = OTHER; note = Phosphorothioate Linkage
  modified_base 3: mod_base = OTHER; note = 2prime-O-methyl Nucleotide
  modified_base 4: mod_base = OTHER; note = 2prime-O-methyl Nucleotide
  modified_base 5: mod_base = OTHER; note = 2prime Fluoro Nucleotide
  modified_base 6: mod_base = OTHER; note = 2prime-O-methyl Nucleotide
  modified_base 7: mod_base = OTHER; note = 2prime-O-methyl Nucleotide
  modified_base 8: mod_base = OTHER; note = 2prime Fluoro Nucleotide
  modified_base 9: mod_base = OTHER; note = 2prime-O-methyl Nucleotide
  modified_base 10: mod_base = OTHER; note = 2prime-O-methyl Nucleotide
  modified_base 11: mod_base = OTHER; note = 2prime-O-methyl Nucleotide
  modified_base 12: mod_base = OTHER; note = 2prime-O-methyl Nucleotide
  modified_base 13: mod_base = OTHER; note = 2prime-O-methyl Nucleotide
  modified_base 14: mod_base = OTHER; note = 2prime Fluoro Nucleotide
  modified_base 15: mod_base = OTHER; note = 2prime-O-methyl Nucleotide
  modified_base 16: mod_base = OTHER; note = 2prime Fluoro Nucleotide
  modified_base 17: mod_base = OTHER; note = 2prime-O-methyl Nucleotide
  modified_base 18: mod_base = OTHER; note = 2prime-O-methyl Nucleotide
  modified_base 19: mod_base = OTHER; note = 2prime-O-methyl Nucleotide
  modified_base 20: mod_base = OTHER; note = 2prime-O-methyl Nucleotide
  modified_base 21: mod_base = OTHER; note = 2prime-O-methyl Nucleotide
  modified_base 21..22: mod_base = OTHER; note = Phosphorothioate Linkage
  modified_base 22: mod_base = OTHER; note = 2prime-O-methyl Nucleotide
  modified_base 22..23: mod_base = OTHER; note = Phosphorothioate Linkage
  modified_base 23: mod_base = OTHER; note = 2prime-O-methyl Nucleotide
  modified_base 1: mod_base = OTHER; note = 5prime-vinylphosphonate linked to uracil
tggaactgagcacttgtacagga

SEQ ID NO: 142 - RNA, 23 nt, synthetic construct
  source 1..23: mol_type = other RNA
  modified_base 1: mod_base = OTHER; note = 2prime-O-methyl Nucleotide
  modified_base 1..2: mod_base = OTHER; note = Phosphorothioate Linkage
  modified_base 2: mod_base = OTHER; note = 2prime Fluoro Nucleotide
  modified_base 2..3: mod_base = OTHER; note = Phosphorothioate Linkage
  modified_base 3: mod_base = OTHER; note = 2prime-O-methyl Nucleotide
  modified_base 4: mod_base = OTHER; note = 2prime-O-methyl Nucleotide
  modified_base 5: mod_base = OTHER; note = 2prime Fluoro Nucleotide
  modified_base 6: mod_base = OTHER; note = 2prime-O-methyl Nucleotide
  modified_base 7: mod_base = OTHER; note = 2prime-O-methyl Nucleotide
  modified_base 8: mod_base = OTHER; note = 2prime Fluoro Nucleotide
  modified_base 9: mod_base = OTHER; note = 2prime-O-methyl Nucleotide
  modified_base 10: mod_base = OTHER; note = 2prime-O-methyl Nucleotide
  modified_base 11: mod_base = OTHER; note = 2prime-O-methyl Nucleotide
  modified_base 12: mod_base = OTHER; note = 2prime-O-methyl Nucleotide
  modified_base 13: mod_base = OTHER; note = 2prime-O-methyl Nucleotide
  modified_base 14: mod_base = OTHER; note = 2prime Fluoro Nucleotide
  modified_base 15: mod_base = OTHER; note = 2prime-O-methyl Nucleotide
  modified_base 16: mod_base = OTHER; note = 2prime Fluoro Nucleotide
  modified_base 17: mod_base = OTHER; note = 2prime-O-methyl Nucleotide
  modified_base 18: mod_base = OTHER; note = 2prime-O-methyl Nucleotide
  modified_base 19: mod_base = OTHER; note = 2prime-O-methyl Nucleotide
  modified_base 20: mod_base = OTHER; note = 2prime-O-methyl Nucleotide
  modified_base 21: mod_base = OTHER; note = 2prime-O-methyl Nucleotide
  modified_base 21..22: mod_base = OTHER; note = Phosphorothioate Linkage
  modified_base 22: mod_base = OTHER; note = 2prime-O-methyl Nucleotide
  modified_base 22..23: mod_base = OTHER; note = Phosphorothioate Linkage
  modified_base 23: mod_base = OTHER; note = 2prime-O-methyl Nucleotide
  modified_base 1: mod_base = OTHER; note = 5prime-vinylphosphonate linked to uracil
tggaactgagcacttgtacagga

SEQ ID NO: 143 - RNA, 23 nt, synthetic construct
  source 1..23: mol_type = other RNA
  modified_base 1: mod_base = OTHER; note = 2prime-O-methyl Nucleotide
  modified_base 1..2: mod_base = OTHER; note = Phosphorothioate Linkage
  modified_base 2: mod_base = OTHER; note = 2prime Fluoro Nucleotide
  modified_base 2..3: mod_base = OTHER; note = Phosphorothioate Linkage
  modified_base 3: mod_base = OTHER; note = 2prime-O-methyl Nucleotide
  modified_base 4: mod_base = OTHER; note = 2prime-O-methyl Nucleotide
  modified_base 5: mod_base = OTHER; note = 2prime Fluoro Nucleotide
  modified_base 6: mod_base = OTHER; note = 2prime-O-methyl Nucleotide
  modified_base 7: mod_base = OTHER; note = 2prime-O-methyl Nucleotide
  modified_base 8: mod_base = OTHER; note = 2prime Fluoro Nucleotide
  modified_base 9: mod_base = OTHER; note = 2prime-O-methyl Nucleotide
  modified_base 10: mod_base = OTHER; note = 2prime-O-methyl Nucleotide
  modified_base 11: mod_base = OTHER; note = 2prime-O-methyl Nucleotide
  modified_base 12: mod_base = OTHER; note = 2prime-O-methyl Nucleotide
  modified_base 13: mod_base = OTHER; note = 2prime-O-methyl Nucleotide
  modified_base 14: mod_base = OTHER; note = 2prime Fluoro Nucleotide
  modified_base 15: mod_base = OTHER; note = 2prime-O-methyl Nucleotide
  modified_base 16: mod_base = OTHER; note = 2prime Fluoro Nucleotide
  modified_base 17: mod_base = OTHER; note = 2prime-O-methyl Nucleotide
  modified_base 18: mod_base = OTHER; note = 2prime-O-methyl Nucleotide
  modified_base 19: mod_base = OTHER; note = 2prime-O-methyl Nucleotide
  modified_base 20: mod_base = OTHER; note = 2prime-O-methyl Nucleotide
  modified_base 21: mod_base = OTHER; note = 2prime-O-methyl Nucleotide
  modified_base 21..22: mod_base = OTHER; note = Phosphorothioate Linkage
  modified_base 22: mod_base = OTHER; note = 2prime-O-methyl Nucleotide
  modified_base 22..23: mod_base = OTHER; note = Phosphorothioate Linkage
  modified_base 23: mod_base = OTHER; note = 2prime-O-methyl Nucleotide
  modified_base 1: mod_base = OTHER; note = 5prime-vinylphosphonate linked to uracil
  modified_base 20..21: mod_base = OTHER; note = Phosphorothioate Linkage
tggaactgagcacttgtacagga

SEQ ID NO: 144 - RNA, 23 nt, synthetic construct
  source 1..23: mol_type = other RNA
  modified_base 1: mod_base = OTHER; note = 2prime-O-methyl Nucleotide
  modified_base 1..2: mod_base = OTHER; note = Phosphorothioate Linkage
  modified_base 2: mod_base = OTHER; note = 2prime Fluoro Nucleotide
  modified_base 2..3: mod_base = OTHER; note = Phosphorothioate Linkage
  modified_base 3: mod_base = OTHER; note = 2prime-O-methyl Nucleotide
  modified_base 4: mod_base = OTHER; note = 2prime-O-methyl Nucleotide
  modified_base 5: mod_base = OTHER; note = 2prime Fluoro Nucleotide
  modified_base 6: mod_base = OTHER; note = 2prime-O-methyl Nucleotide
  modified_base 7: mod_base = OTHER; note = 2prime-O-methyl Nucleotide
  modified_base 8: mod_base = OTHER; note = 2prime Fluoro Nucleotide
  modified_base 9: mod_base = OTHER; note = 2prime-O-methyl Nucleotide
  modified_base 10: mod_base = OTHER; note = 2prime-O-methyl Nucleotide
  modified_base 11: mod_base = OTHER; note = 2prime-O-methyl Nucleotide
  modified_base 12: mod_base = OTHER; note = 2prime-O-methyl Nucleotide
  modified_base 13: mod_base = OTHER; note = 2prime-O-methyl Nucleotide
  modified_base 14: mod_base = OTHER; note = 2prime Fluoro Nucleotide
  modified_base 15: mod_base = OTHER; note = 2prime-O-methyl Nucleotide
  modified_base 16: mod_base = OTHER; note = 2prime Fluoro Nucleotide
  modified_base 17: mod_base = OTHER; note = 2prime-O-methyl Nucleotide
  modified_base 18: mod_base = OTHER; note = 2prime-O-methyl Nucleotide
  modified_base 19: mod_base = OTHER; note = 2prime-O-methyl Nucleotide
  modified_base 20: mod_base = OTHER; note = 2prime-O-methyl Nucleotide
  modified_base 21: mod_base = OTHER; note = 2prime-O-methyl Nucleotide
  modified_base 21..22: mod_base = OTHER; note = Phosphorothioate Linkage
  modified_base 22: mod_base = OTHER; note = 2prime-O-methyl Nucleotide
  modified_base 22..23: mod_base = OTHER; note = Phosphorothioate Linkage
  modified_base 23: mod_base = OTHER; note = 2prime-O-methyl Nucleotide
  modified_base 1: mod_base = OTHER; note = 5prime-vinylphosphonate linked to uracil
  modified_base 20..21: mod_base = OTHER; note = Phosphorothioate Linkage
tggaactgagcacttgtacagga

SEQ ID NO: 145 - RNA, 21 nt, synthetic construct
  source 1..21: mol_type = other RNA
  modified_base 17: mod_base = OTHER; note = thymine
ctgtacaagtgctcagttcca

SEQ ID NO: 146 - RNA, 21 nt, synthetic construct
  source 1..21: mol_type = other RNA
tgtacaagtgctcagttccaa

SEQ ID NO: 147 - RNA, 23 nt, synthetic construct
  source 1..23: mol_type = other RNA
  modified_base 7: mod_base = OTHER; note = thymine
tggaactgagcacttgtacagga

SEQ ID NO: 148 - RNA, 22 nt, synthetic construct
  source 1..22: mol_type = other RNA
ttggaactgagcacttgtacag

SEQ ID NO: 149 - RNA, 22 nt, synthetic construct
  source 1..22: mol_type = other RNA
ttggactgagcacttgtacagg

SEQ ID NO: 150 - RNA, 22 nt, synthetic construct
  source 1..22: mol_type = other RNA
ttggaatgagcacttgtacagg

SEQ ID NO: 151 - RNA, 22 nt, synthetic construct
  source 1..22: mol_type = other RNA
ttggaacgagcacttgtacagg

SEQ ID NO: 152 - RNA, 21 nt, synthetic construct
  source 1..21: mol_type = other RNA
  modified_base 1..2: mod_base = OTHER; note = Phosphorothioate Linkage
  modified_base 2..3: mod_base = OTHER; note = Phosphorothioate Linkage
  modified_base 19..20: mod_base = OTHER; note = Phosphorothioate Linkage
  modified_base 20..21: mod_base = OTHER; note = Phosphorothioate Linkage
  modified_base 1: mod_base = OTHER; note = 2prime-O-methyl Nucleotide
  modified_base 2: mod_base = OTHER; note = 2prime-O-methyl Nucleotide
  modified_base 3: mod_base = OTHER; note = 2prime-O-methyl Nucleotide
  modified_base 4: mod_base = OTHER; note = 2prime-O-methyl Nucleotide
  modified_base 5: mod_base = OTHER; note = 2prime-O-methyl Nucleotide
  modified_base 6: mod_base = OTHER; note = 2prime-O-methyl Nucleotide
  modified_base 8: mod_base = OTHER; note = 2prime-O-methyl Nucleotide
  modified_base 12: mod_base = OTHER; note = 2prime-O-methyl Nucleotide
  modified_base 13: mod_base = OTHER; note = 2prime-O-methyl Nucleotide
  modified_base 14: mod_base = OTHER; note = 2prime-O-methyl Nucleotide
  modified_base 15: mod_base = OTHER; note = 2prime-O-methyl Nucleotide
  modified_base 16: mod_base = OTHER; note = 2prime-O-methyl Nucleotide
  modified_base 17: mod_base = OTHER; note = 2prime-O-methyl Nucleotide
  modified_base 18: mod_base = OTHER; note = 2prime-O-methyl Nucleotide
  modified_base 19: mod_base = OTHER; note = 2prime-O-methyl Nucleotide
  modified_base 20: mod_base = OTHER; note = 2prime-O-methyl Nucleotide
  modified_base 21: mod_base = OTHER; note = 2prime-O-methyl Nucleotide
  modified_base 7: mod_base = OTHER; note = 2prime Fluoro Nucleotide
  modified_base 9: mod_base = OTHER; note = 2prime Fluoro Nucleotide
  modified_base 10: mod_base = OTHER; note = 2prime Fluoro Nucleotide
  modified_base 11: mod_base = OTHER; note = 2prime Fluoro Nucleotide
tgtacaagtgctcagttccaa

SEQ ID NO: 153 - RNA, 21 nt, synthetic construct
  source 1..21: mol_type = other RNA
  modified_base 1..2: mod_base = OTHER; note = Phosphorothioate Linkage
  modified_base 2..3: mod_base = OTHER; note = Phosphorothioate Linkage
  modified_base 19..20: mod_base = OTHER; note = Phosphorothioate Linkage
  modified_base 20..21: mod_base = OTHER; note = Phosphorothioate Linkage
  modified_base 1: mod_base = OTHER; note = 2prime-O-methyl Nucleotide
  modified_base 2: mod_base = OTHER; note = 2prime-O-methyl Nucleotide
  modified_base 3: mod_base = OTHER; note = 2prime-O-methyl Nucleotide
  modified_base 4: mod_base = OTHER; note = 2prime-O-methyl Nucleotide
  modified_base 5: mod_base = OTHER; note = 2prime-O-methyl Nucleotide
  modified_base 6: mod_base = OTHER; note = 2prime-O-methyl Nucleotide
  modified_base 8: mod_base = OTHER; note = 2prime-O-methyl Nucleotide
  modified_base 12: mod_base = OTHER; note = 2prime-O-methyl Nucleotide
  modified_base 13: mod_base = OTHER; note = 2prime-O-methyl Nucleotide
  modified_base 14: mod_base = OTHER; note = 2prime-O-methyl Nucleotide
  modified_base 15: mod_base = OTHER; note = 2prime-O-methyl Nucleotide
  modified_base 16: mod_base = OTHER; note = 2prime-O-methyl Nucleotide
  modified_base 17: mod_base = OTHER; note = 2prime-O-methyl Nucleotide
  modified_base 18: mod_base = OTHER; note = 2prime-O-methyl Nucleotide
  modified_base 19: mod_base = OTHER; note = 2prime-O-methyl Nucleotide
  modified_base 20: mod_base = OTHER; note = 2prime-O-methyl Nucleotide
  modified_base 21: mod_base = OTHER; note = 2prime-O-methyl Nucleotide
  modified_base 7: mod_base = OTHER; note = 2prime Fluoro Nucleotide
  modified_base 9: mod_base = OTHER; note = 2prime Fluoro Nucleotide
  modified_base 11: mod_base = OTHER; note = 2prime Fluoro Nucleotide
tgtacaagtgctcagttccaa

SEQ ID NO: 154 - RNA, 21 nt, synthetic construct
  source 1..21: mol_type = other RNA
  modified_base 1..2: mod_base = OTHER; note = Phosphorothioate Linkage
  modified_base 2..3: mod_base = OTHER; note = Phosphorothioate Linkage
  modified_base 19..20: mod_base = OTHER; note = Phosphorothioate Linkage
  modified_base 20..21: mod_base = OTHER; note = Phosphorothioate Linkage
  modified_base 1: mod_base = OTHER; note = 2prime-O-methyl Nucleotide
  modified_base 2: mod_base = OTHER; note = 2prime-O-methyl Nucleotide
  modified_base 3: mod_base = OTHER; note = 2prime-O-methyl Nucleotide
  modified_base 4: mod_base = OTHER; note = 2prime-O-methyl Nucleotide
  modified_base 5: mod_base = OTHER; note = 2prime-O-methyl Nucleotide
  modified_base 6: mod_base = OTHER; note = 2prime-O-methyl Nucleotide
  modified_base 7: mod_base = OTHER; note = 2prime-O-methyl Nucleotide
  modified_base 8: mod_base = OTHER; note = 2prime-O-methyl Nucleotide
  modified_base 12: mod_base = OTHER; note = 2prime-O-methyl Nucleotide
  modified_base 13: mod_base = OTHER; note = 2prime-O-methyl Nucleotide
  modified_base 14: mod_base = OTHER; note = 2prime-O-methyl Nucleotide
  modified_base 15: mod_base = OTHER; note = 2prime-O-methyl Nucleotide
  modified_base 16: mod_base = OTHER; note = 2prime-O-methyl Nucleotide
  modified_base 17: mod_base = OTHER; note = 2prime-O-methyl Nucleotide
  modified_base 18: mod_base = OTHER; note = 2prime-O-methyl Nucleotide
  modified_base 19: mod_base = OTHER; note = 2prime-O-methyl Nucleotide
  modified_base 20: mod_base = OTHER; note = 2prime-O-methyl Nucleotide
  modified_base 21: mod_base = OTHER; note = 2prime-O-methyl Nucleotide
  modified_base 9: mod_base = OTHER; note = 2prime Fluoro Nucleotide
  modified_base 10: mod_base = OTHER; note = 2prime Fluoro Nucleotide
  modified_base 11: mod_base = OTHER; note = 2prime Fluoro Nucleotide
tgtacaagtgctcagttccaa

SEQ ID NO: 155 - RNA, 21 nt, synthetic construct
  source 1..21: mol_type = other RNA
  modified_base 1..2: mod_base = OTHER; note = Phosphorothioate Linkage
  modified_base 2..3: mod_base = OTHER; note = Phosphorothioate Linkage
  modified_base 19..20: mod_base = OTHER; note = Phosphorothioate Linkage
  modified_base 20..21: mod_base = OTHER; note = Phosphorothioate Linkage
  modified_base 1: mod_base = OTHER; note = 2prime-O-methyl Nucleotide
  modified_base 2: mod_base = OTHER; note = 2prime-O-methyl Nucleotide
  modified_base 3: mod_base = OTHER; note = 2prime-O-methyl Nucleotide
  modified_base 4: mod_base = OTHER; note = 2prime-O-methyl Nucleotide
  modified_base 5: mod_base = OTHER; note = 2prime-O-methyl Nucleotide
  modified_base 6: mod_base = OTHER; note = 2prime-O-methyl Nucleotide
  modified_base 7: mod_base = OTHER; note = 2prime-O-methyl Nucleotide
  modified_base 8: mod_base = OTHER; note = 2prime-O-methyl Nucleotide
  modified_base 12: mod_base = OTHER; note = 2prime-O-methyl Nucleotide
  modified_base 13: mod_base = OTHER; note = 2prime-O-methyl Nucleotide
  modified_base 14: mod_base = OTHER; note = 2prime-O-methyl Nucleotide
  modified_base 15: mod_base = OTHER; note = 2prime-O-methyl Nucleotide
  modified_base 16: mod_base = OTHER; note = 2prime-O-methyl Nucleotide
  modified_base 17: mod_base = OTHER; note = 2prime-O-methyl Nucleotide
  modified_base 18: mod_base = OTHER; note = 2prime-O-methyl Nucleotide
  modified_base 19: mod_base = OTHER; note = 2prime-O-methyl Nucleotide
  modified_base 20: mod_base = OTHER; note = 2prime-O-methyl Nucleotide
  modified_base 21: mod_base = OTHER; note = 2prime-O-methyl Nucleotide
  modified_base 9: mod_base = OTHER; note = 2prime Fluoro Nucleotide
  modified_base 10: mod_base = OTHER; note = 2prime Fluoro Nucleotide
  modified_base 11: mod_base = OTHER; note = 2prime Fluoro Nucleotide
  modified_base 21: mod_base = OTHER; note = Phosphorylated adenine
tgtacaagtgctcagttccaa

SEQ ID NO: 156 - RNA, 21 nt, synthetic construct
  source 1..21: mol_type = other RNA
  modified_base 1..2: mod_base = OTHER; note = Phosphorothioate Linkage
  modified_base 2..3: mod_base = OTHER; note = Phosphorothioate Linkage
  modified_base 19..20: mod_base = OTHER; note = Phosphorothioate Linkage
  modified_base 20..21: mod_base = OTHER; note = Phosphorothioate Linkage
  modified_base 1: mod_base = OTHER; note = 2prime-O-methyl Nucleotide
  modified_base 2: mod_base = OTHER; note = 2prime-O-methyl Nucleotide
  modified_base 3: mod_base = OTHER; note = 2prime-O-methyl Nucleotide
  modified_base 4: mod_base = OTHER; note = 2prime-O-methyl Nucleotide
  modified_base 5: mod_base = OTHER; note = 2prime-O-methyl Nucleotide
  modified_base 6: mod_base = OTHER; note = 2prime-O-methyl Nucleotide
  modified_base 7: mod_base = OTHER; note = 2prime-O-methyl Nucleotide
  modified_base 8: mod_base = OTHER; note = 2prime-O-methyl Nucleotide
  modified_base 12: mod_base = OTHER; note = 2prime-O-methyl Nucleotide
  modified_base 13: mod_base = OTHER; note = 2prime-O-methyl Nucleotide
  modified_base 14: mod_base = OTHER; note = 2prime-O-methyl Nucleotide
  modified_base 15: mod_base = OTHER; note = 2prime-O-methyl Nucleotide
  modified_base 16: mod_base = OTHER; note = 2prime-O-methyl Nucleotide
  modified_base 17: mod_base = OTHER; note = 2prime-O-methyl Nucleotide
  modified_base 18: mod_base = OTHER; note = 2prime-O-methyl Nucleotide
  modified_base 19: mod_base = OTHER; note = 2prime-O-methyl Nucleotide
  modified_base 20: mod_base = OTHER; note = 2prime-O-methyl Nucleotide
  modified_base 21: mod_base = OTHER; note = 2prime-O-methyl Nucleotide
  modified_base 9: mod_base = OTHER; note = 2prime Fluoro Nucleotide
  modified_base 10: mod_base = OTHER; note = 2prime Fluoro Nucleotide
  modified_base 11: mod_base = OTHER; note = 2prime Fluoro Nucleotide
tgtacaagtgctcagttccaa

SEQ ID NO: 157 - RNA, 21 nt, synthetic construct
  source 1..21: mol_type = other RNA
  modified_base 1..2: mod_base = OTHER; note = Phosphorothioate Linkage
  modified_base 2..3: mod_base = OTHER; note = Phosphorothioate Linkage
  modified_base 19..20: mod_base = OTHER; note = Phosphorothioate Linkage
  modified_base 20..21: mod_base = OTHER; note = Phosphorothioate Linkage
  modified_base 1: mod_base = OTHER; note = 2prime-O-methyl Nucleotide
  modified_base 2: mod_base = OTHER; note = 2prime-O-methyl Nucleotide
  modified_base 3: mod_base = OTHER; note = 2prime-O-methyl Nucleotide
  modified_base 4: mod_base = OTHER; note = 2prime-O-methyl Nucleotide
  modified_base 5: mod_base = OTHER; note = 2prime-O-methyl Nucleotide
  modified_base 6: mod_base = OTHER; note = 2prime-O-methyl Nucleotide
  modified_base 7: mod_base = OTHER; note = 2prime-O-methyl Nucleotide
  modified_base 8: mod_base = OTHER; note = 2prime-O-methyl Nucleotide
  modified_base 12: mod_base = OTHER; note = 2prime-O-methyl Nucleotide
  modified_base 13: mod_base = OTHER; note = 2prime-O-methyl Nucleotide
  modified_base 14: mod_base = OTHER; note = 2prime-O-methyl Nucleotide
  modified_base 15: mod_base = OTHER; note = 2prime-O-methyl Nucleotide
  modified_base 16: mod_base = OTHER; note = 2prime-O-methyl Nucleotide
  modified_base 17: mod_base = OTHER; note = 2prime-O-methyl Nucleotide
  modified_base 18: mod_base = OTHER; note = 2prime-O-methyl Nucleotide
  modified_base 19: mod_base = OTHER; note = 2prime-O-methyl Nucleotide
  modified_base 20: mod_base = OTHER; note = 2prime-O-methyl Nucleotide
  modified_base 21: mod_base = OTHER; note = 2prime-O-methyl Nucleotide
  modified_base 9: mod_base = OTHER; note = 2prime Fluoro Nucleotide
  modified_base 10: mod_base = OTHER; note = 2prime Fluoro Nucleotide
  modified_base 11: mod_base = OTHER; note = 2prime Fluoro Nucleotide
tgtacaagtgctcagttccaa

SEQ ID NO: 158 - RNA, 21 nt, synthetic construct
  source 1..21: mol_type = other RNA
  modified_base 1..2: mod_base = OTHER; note = Phosphorothioate Linkage
  modified_base 2..3: mod_base = OTHER; note = Phosphorothioate Linkage
  modified_base 19..20: mod_base = OTHER; note = Phosphorothioate Linkage
  modified_base 20..21: mod_base = OTHER; note = Phosphorothioate Linkage
  modified_base 1: mod_base = OTHER; note = 2prime-O-methyl Nucleotide
  modified_base 2: mod_base = OTHER; note = 2prime-O-methyl Nucleotide
  modified_base 3: mod_base = OTHER; note = 2prime-O-methyl Nucleotide
  modified_base 4: mod_base = OTHER; note = 2prime-O-methyl Nucleotide
  modified_base 5: mod_base = OTHER; note = 2prime-O-methyl Nucleotide
  modified_base 6: mod_base = OTHER; note = 2prime-O-methyl Nucleotide
  modified_base 7: mod_base = OTHER; note = 2prime-O-methyl Nucleotide
  modified_base 8: mod_base = OTHER; note = 2prime-O-methyl Nucleotide
  modified_base 12: mod_base = OTHER; note = 2prime-O-methyl Nucleotide
  modified_base 13: mod_base = OTHER; note = 2prime-O-methyl Nucleotide
  modified_base 14: mod_base = OTHER; note = 2prime-O-methyl Nucleotide
  modified_base 15: mod_base = OTHER; note = 2prime-O-methyl Nucleotide
  modified_base 16: mod_base = OTHER; note = 2prime-O-methyl Nucleotide
  modified_base 17: mod_base = OTHER; note = 2prime-O-methyl Nucleotide
  modified_base 18: mod_base = OTHER; note = 2prime-O-methyl Nucleotide
  modified_base 19: mod_base = OTHER; note = 2prime-O-methyl Nucleotide
  modified_base 20: mod_base = OTHER; note = 2prime-O-methyl Nucleotide
  modified_base 21: mod_base = OTHER; note = 2prime-O-methyl Nucleotide
  modified_base 9: mod_base = OTHER; note = 2prime Fluoro Nucleotide
  modified_base 10: mod_base = OTHER; note = 2prime Fluoro Nucleotide
  modified_base 11: mod_base = OTHER; note = 2prime Fluoro Nucleotide
tgtacaagtgctcagttccaa

SEQ ID NO: 159 - RNA, 21 nt, synthetic construct
  source 1..21: mol_type = other RNA
  modified_base 1..2: mod_base = OTHER; note = Phosphorothioate Linkage
  modified_base 2..3: mod_base = OTHER; note = Phosphorothioate Linkage
  modified_base 19..20: mod_base = OTHER; note = Phosphorothioate Linkage
  modified_base 20..21: mod_base = OTHER; note = Phosphorothioate Linkage
  modified_base 1: mod_base = OTHER; note = 2prime-O-methyl Nucleotide
  modified_base 2: mod_base = OTHER; note = 2prime-O-methyl Nucleotide
  modified_base 3: mod_base = OTHER; note = 2prime-O-methyl Nucleotide
  modified_base 4: mod_base = OTHER; note = 2prime-O-methyl Nucleotide
  modified_base 5: mod_base = OTHER; note = 2prime-O-methyl Nucleotide
  modified_base 6: mod_base = OTHER; note = 2prime-O-methyl Nucleotide
  modified_base 7: mod_base = OTHER; note = 2prime-O-methyl Nucleotide
  modified_base 8: mod_base = OTHER; note = 2prime-O-methyl Nucleotide
  modified_base 12: mod_base = OTHER; note = 2prime-O-methyl Nucleotide
  modified_base 13: mod_base = OTHER; note = 2prime-O-methyl Nucleotide
  modified_base 14: mod_base = OTHER; note = 2prime-O-methyl Nucleotide
  modified_base 15: mod_base = OTHER; note = 2prime-O-methyl Nucleotide
  modified_base 16: mod_base = OTHER; note = 2prime-O-methyl Nucleotide
  modified_base 17: mod_base = OTHER; note = 2prime-O-methyl Nucleotide
  modified_base 18: mod_base = OTHER; note = 2prime-O-methyl Nucleotide
  modified_base 19: mod_base = OTHER; note = 2prime-O-methyl Nucleotide
  modified_base 20: mod_base = OTHER; note = 2prime-O-methyl Nucleotide
  modified_base 21: mod_base = OTHER; note = 2prime-O-methyl Nucleotide
  modified_base 9: mod_base = OTHER; note = 2prime Fluoro Nucleotide
  modified_base 10: mod_base = OTHER; note = 2prime Fluoro Nucleotide
  modified_base 11: mod_base = OTHER; note = 2prime Fluoro Nucleotide
tgtacaagtgctcagttccaa

SEQ ID NO: 160 - RNA, 21 nt, synthetic construct
  source 1..21: mol_type = other RNA
  modified_base 1..2: mod_base = OTHER; note = Phosphorothioate Linkage
  modified_base 2..3: mod_base = OTHER; note = Phosphorothioate Linkage
  modified_base 19..20: mod_base = OTHER; note = Phosphorothioate Linkage
  modified_base 20..21: mod_base = OTHER; note = Phosphorothioate Linkage
  modified_base 1: mod_base = OTHER; note = 2prime-O-methyl Nucleotide
  modified_base 2: mod_base = OTHER; note = 2prime-O-methyl Nucleotide
  modified_base 3: mod_base = OTHER; note = 2prime-O-methyl Nucleotide
  modified_base 4: mod_base = OTHER; note = 2prime-O-methyl Nucleotide
  modified_base 5: mod_base = OTHER; note = 2prime-O-methyl Nucleotide
  modified_base 6: mod_base = OTHER; note = 2prime-O-methyl Nucleotide
  modified_base 7: mod_base = OTHER; note = 2prime-O-methyl Nucleotide
  modified_base 8: mod_base = OTHER; note = 2prime-O-methyl Nucleotide
  modified_base 12: mod_base = OTHER; note = 2prime-O-methyl Nucleotide
  modified_base 13: mod_base = OTHER; note = 2prime-O-methyl Nucleotide
  modified_base 14: mod_base = OTHER; note = 2prime-O-methyl Nucleotide
  modified_base 15: mod_base = OTHER; note = 2prime-O-methyl Nucleotide
  modified_base 16: mod_base = OTHER; note = 2prime-O-methyl Nucleotide
  modified_base 17: mod_base = OTHER; note = 2prime-O-methyl Nucleotide
  modified_base 18: mod_base = OTHER; note = 2prime-O-methyl Nucleotide
  modified_base 19: mod_base = OTHER; note = 2prime-O-methyl Nucleotide
  modified_base 20: mod_base = OTHER; note = 2prime-O-methyl Nucleotide
  modified_base 21: mod_base = OTHER; note = 2prime-O-methyl Nucleotide
  modified_base 9: mod_base = OTHER; note = 2prime Fluoro Nucleotide
  modified_base 10: mod_base = OTHER; note = 2prime Fluoro Nucleotide
  modified_base 11: mod_base = OTHER; note = 2prime Fluoro Nucleotide
tgtacaagtgctcagttccaa

SEQ ID NO: 161 - RNA, 21 nt, synthetic construct
  source 1..21: mol_type = other RNA
  modified_base 1..2: mod_base = OTHER; note = Phosphorothioate Linkage
  modified_base 2..3: mod_base = OTHER; note = Phosphorothioate Linkage
  modified_base 19..20: mod_base = OTHER; note = Phosphorothioate Linkage
  modified_base 20..21: mod_base = OTHER; note = Phosphorothioate Linkage
  modified_base 1: mod_base = OTHER; note = 2prime-O-methyl Nucleotide
  modified_base 2: mod_base = OTHER; note = 2prime-O-methyl Nucleotide
  modified_base 3: mod_base = OTHER; note = 2prime-O-methyl Nucleotide
  modified_base 4: mod_base = OTHER; note = 2prime-O-methyl Nucleotide
  modified_base 5: mod_base = OTHER; note = 2prime-O-methyl Nucleotide
  modified_base 6: mod_base = OTHER; note = 2prime-O-methyl Nucleotide
  modified_base 7: mod_base = OTHER; note = 2prime-O-methyl Nucleotide
  modified_base 8: mod_base = OTHER; note = 2prime-O-methyl Nucleotide
  modified_base 12: mod_base = OTHER; note = 2prime-O-methyl Nucleotide
  modified_base 13: mod_base = OTHER; note = 2prime-O-methyl Nucleotide
  modified_base 14: mod_base = OTHER; note = 2prime-O-methyl Nucleotide
  modified_base 15: mod_base = OTHER; note = 2prime-O-methyl Nucleotide
  modified_base 16: mod_base = OTHER; note = 2prime-O-methyl Nucleotide
  modified_base 17: mod_base = OTHER; note = 2prime-O-methyl Nucleotide
  modified_base 18: mod_base = OTHER; note = 2prime-O-methyl Nucleotide
  modified_base 19: mod_base = OTHER; note = 2prime-O-methyl Nucleotide
  modified_base 20: mod_base = OTHER; note = 2prime-O-methyl Nucleotide
  modified_base 21: mod_base = OTHER; note = 2prime-O-methyl Nucleotide
  modified_base 9: mod_base = OTHER; note = 2prime Fluoro Nucleotide
  modified_base 10: mod_base = OTHER; note = 2prime Fluoro Nucleotide
  modified_base 11: mod_base = OTHER; note = 2prime Fluoro Nucleotide
tgtacaagtgctcagttccaa

SEQ ID NO: 162 - RNA, 21 nt, synthetic construct
  source 1..21: mol_type = other RNA
  modified_base 1..2: mod_base = OTHER; note = Phosphorothioate Linkage
  modified_base 2..3: mod_base = OTHER; note = Phosphorothioate Linkage
  modified_base 19..20: mod_base = OTHER; note = Phosphorothioate Linkage
  modified_base 20..21: mod_base = OTHER; note = Phosphorothioate Linkage
  modified_base 1: mod_base = OTHER; note = 2prime-O-methyl Nucleotide
  modified_base 2: mod_base = OTHER; note = 2prime-O-methyl Nucleotide
  modified_base 3: mod_base = OTHER; note = 2prime-O-methyl Nucleotide
  modified_base 4: mod_base = OTHER; note = 2prime-O-methyl Nucleotide
  modified_base 5: mod_base = OTHER; note = 2prime-O-methyl Nucleotide
  modified_base 6: mod_base = OTHER; note = 2prime-O-methyl Nucleotide
  modified_base 7: mod_base = OTHER; note = 2prime-O-methyl Nucleotide
  modified_base 8: mod_base = OTHER; note = 2prime-O-methyl Nucleotide
  modified_base 12: mod_base = OTHER; note = 2prime-O-methyl Nucleotide
  modified_base 13: mod_base = OTHER; note = 2prime-O-methyl Nucleotide
  modified_base 14: mod_base = OTHER; note = 2prime-O-methyl Nucleotide
  modified_base 15: mod_base = OTHER; note = 2prime-O-methyl Nucleotide
  modified_base 16: mod_base = OTHER; note = 2prime-O-methyl Nucleotide
  modified_base 17: mod_base = OTHER; note = 2prime-O-methyl Nucleotide
  modified_base 18: mod_base = OTHER; note = 2prime-O-methyl Nucleotide
  modified_base 19: mod_base = OTHER; note = 2prime-O-methyl Nucleotide
  modified_base 20: mod_base = OTHER; note = 2prime-O-methyl Nucleotide
  modified_base 21: mod_base = OTHER; note = 2prime-O-methyl Nucleotide
  modified_base 9: mod_base = OTHER; note = 2prime Fluoro Nucleotide
  modified_base 10: mod_base = OTHER; note = 2prime Fluoro Nucleotide
  modified_base 11: mod_base = OTHER; note = 2prime Fluoro Nucleotide
tgtacaagtgctcagttccaa

SEQ ID NO: 163 - RNA, 21 nt, synthetic construct
  source 1..21: mol_type = other RNA
  modified_base 1..2: mod_base = OTHER; note = Phosphorothioate Linkage
  modified_base 2..3: mod_base = OTHER; note = Phosphorothioate Linkage
  modified_base 19..20: mod_base = OTHER; note = Phosphorothioate Linkage
  modified_base 20..21: mod_base = OTHER; note = Phosphorothioate Linkage
  modified_base 1: mod_base = OTHER; note = 2prime-O-methyl Nucleotide
  modified_base 2: mod_base = OTHER; note = 2prime-O-methyl Nucleotide
  modified_base 3: mod_base = OTHER; note = 2prime-O-methyl Nucleotide
  modified_base 4: mod_base = OTHER; note = 2prime-O-methyl Nucleotide
  modified_base 5: mod_base = OTHER; note = 2prime-O-methyl Nucleotide
  modified_base 6: mod_base = OTHER; note = 2prime-O-methyl Nucleotide
  modified_base 7: mod_base = OTHER; note = 2prime-O-methyl Nucleotide
  modified_base 8: mod_base = OTHER; note = 2prime-O-methyl Nucleotide
  modified_base 12: mod_base = OTHER; note = 2prime-O-methyl Nucleotide
  modified_base 13: mod_base = OTHER; note = 2prime-O-methyl Nucleotide
  modified_base 14: mod_base = OTHER; note = 2prime-O-methyl Nucleotide
  modified_base 15: mod_base = OTHER; note = 2prime-O-methyl Nucleotide
  modified_base 16: mod_base = OTHER; note = 2prime-O-methyl Nucleotide
  modified_base 17: mod_base = OTHER; note = 2prime-O-methyl Nucleotide
  modified_base 18: mod_base = OTHER; note = 2prime-O-methyl Nucleotide
  modified_base 19: mod_base = OTHER; note = 2prime-O-methyl Nucleotide
  modified_base 20: mod_base = OTHER; note = 2prime-O-methyl Nucleotide
  modified_base 21: mod_base = OTHER; note = 2prime-O-methyl Nucleotide
  modified_base 9: mod_base = OTHER; note = 2prime Fluoro Nucleotide
  modified_base 10: mod_base = OTHER; note = 2prime Fluoro Nucleotide
  modified_base 11: mod_base = OTHER; note = 2prime Fluoro Nucleotide
tgtacaagtgctcagttccaa

SEQ ID NO: 164 - RNA, 21 nt, synthetic construct
  source 1..21: mol_type = other RNA
  modified_base 1..2: mod_base = OTHER; note = Phosphorothioate Linkage
  modified_base 2..3: mod_base = OTHER; note = Phosphorothioate Linkage
  modified_base 19..20: mod_base = OTHER; note = Phosphorothioate Linkage
  modified_base 20..21: mod_base = OTHER; note = Phosphorothioate Linkage
  modified_base 1: mod_base = OTHER; note = 2prime-O-methyl Nucleotide
  modified_base 2: mod_base = OTHER; note = 2prime-O-methyl Nucleotide
  modified_base 3: mod_base = OTHER; note = 2prime-O-methyl Nucleotide
  modified_base 4: mod_base = OTHER; note = 2prime-O-methyl Nucleotide
  modified_base 5: mod_base = OTHER; note = 2prime-O-methyl Nucleotide
  modified_base 6: mod_base = OTHER; note = 2prime-O-methyl Nucleotide
  modified_base 7: mod_base = OTHER; note = 2prime-O-methyl Nucleotide
  modified_base 8: mod_base = OTHER; note = 2prime-O-methyl Nucleotide
  modified_base 12: mod_base = OTHER; note = 2prime-O-methyl Nucleotide
  modified_base 13: mod_base = OTHER; note = 2prime-O-methyl Nucleotide
  modified_base 14: mod_base = OTHER; note = 2prime-O-methyl Nucleotide
  modified_base 15: mod_base = OTHER; note = 2prime-O-methyl Nucleotide
  modified_base 16: mod_base = OTHER; note = 2prime-O-methyl Nucleotide
  modified_base 17: mod_base = OTHER; note = 2prime-O-methyl Nucleotide
  modified_base 18: mod_base = OTHER; note = 2prime-O-methyl Nucleotide
  modified_base 19: mod_base = OTHER; note = 2prime-O-methyl Nucleotide
  modified_base 20: mod_base = OTHER; note = 2prime-O-methyl Nucleotide
  modified_base 21: mod_base = OTHER; note = 2prime-O-methyl Nucleotide
  modified_base 9: mod_base = OTHER; note = 2prime Fluoro Nucleotide
  modified_base 10: mod_base = OTHER; note = 2prime Fluoro Nucleotide
  modified_base 11: mod_base = OTHER; note = 2prime Fluoro Nucleotide
tgtacaagtgctcagttccaa

SEQ ID NO: 165 - RNA, 21 nt, synthetic construct
  source 1..21: mol_type = other RNA
  modified_base 1..2: mod_base = OTHER; note = Phosphorothioate Linkage
  modified_base 2..3: mod_base = OTHER; note = Phosphorothioate Linkage
  modified_base 19..20: mod_base = OTHER; note = Phosphorothioate Linkage
  modified_base 20..21: mod_base = OTHER; note = Phosphorothioate Linkage
  modified_base 1: mod_base = OTHER; note = 2prime-O-methyl Nucleotide
  modified_base 2: mod_base = OTHER; note = 2prime-O-methyl Nucleotide
  modified_base 3: mod_base = OTHER; note = 2prime-O-methyl Nucleotide
  modified_base 4: mod_base = OTHER; note = 2prime-O-methyl Nucleotide
  modified_base 5: mod_base = OTHER; note = 2prime-O-methyl Nucleotide
  modified_base 6: mod_base = OTHER; note = 2prime-O-methyl Nucleotide
  modified_base 7: mod_base = OTHER; note = 2prime-O-methyl Nucleotide
  modified_base 8: mod_base = OTHER; note = 2prime-O-methyl Nucleotide
  modified_base 12: mod_base = OTHER; note = 2prime-O-methyl Nucleotide
  modified_base 13: mod_base = OTHER; note = 2prime-O-methyl Nucleotide
  modified_base 14: mod_base = OTHER; note = 2prime-O-methyl Nucleotide
  modified_base 15: mod_base = OTHER; note = 2prime-O-methyl Nucleotide
  modified_base 16: mod_base = OTHER; note = 2prime-O-methyl Nucleotide
  modified_base 17: mod_base = OTHER; note = 2prime-O-methyl Nucleotide
  modified_base 18: mod_base = OTHER; note = 2prime-O-methyl Nucleotide
  modified_base 19: mod_base = OTHER; note = 2prime-O-methyl Nucleotide
  modified_base 20: mod_base = OTHER; note = 2prime-O-methyl Nucleotide
  modified_base 21: mod_base = OTHER; note = 2prime-O-methyl Nucleotide
  modified_base 9: mod_base = OTHER; note = 2prime Fluoro Nucleotide
  modified_base 10: mod_base = OTHER; note = 2prime Fluoro Nucleotide
  modified_base 11: mod_base = OTHER; note = 2prime Fluoro Nucleotide
tgtacaagtgctcagttccaa

SEQ ID NO: 166 - RNA, 21 nt, synthetic construct
  source 1..21: mol_type = other RNA
  modified_base 1..2: mod_base = OTHER; note = Phosphorothioate Linkage
  modified_base 2..3: mod_base = OTHER; note = Phosphorothioate Linkage
  modified_base 19..20: mod_base = OTHER; note = Phosphorothioate Linkage
  modified_base 20..21: mod_base = OTHER; note = Phosphorothioate Linkage
  modified_base 1: mod_base = OTHER; note = 2prime-O-methyl Nucleotide
  modified_base 2: mod_base = OTHER; note = 2prime-O-methyl Nucleotide
  modified_base 3: mod_base = OTHER; note = 2prime-O-methyl Nucleotide
  modified_base 4: mod_base = OTHER; note = 2prime-O-methyl Nucleotide
  modified_base 5: mod_base = OTHER; note = 2prime-O-methyl Nucleotide
  modified_base 6: mod_base = OTHER; note = 2prime-O-methyl Nucleotide
  modified_base 8: mod_base = OTHER; note = 2prime-O-methyl Nucleotide
  modified_base 12: mod_base = OTHER; note = 2prime-O-methyl Nucleotide
  modified_base 13: mod_base = OTHER; note = 2prime-O-methyl Nucleotide
  modified_base 14: mod_base = OTHER; note = 2prime-O-methyl Nucleotide
  modified_base 15: mod_base = OTHER; note = 2prime-O-methyl Nucleotide
  modified_base 16: mod_base = OTHER; note = 2prime-O-methyl Nucleotide
  modified_base 17: mod_base = OTHER; note = 2prime-O-methyl Nucleotide
  modified_base 18: mod_base = OTHER; note = 2prime-O-methyl Nucleotide
  modified_base 19: mod_base = OTHER; note = 2prime-O-methyl Nucleotide
  modified_base 20: mod_base = OTHER; note = 2prime-O-methyl Nucleotide
  modified_base 21: mod_base = OTHER; note = 2prime-O-methyl Nucleotide
  modified_base 7: mod_base = OTHER; note = 2prime Fluoro Nucleotide
  modified_base 9: mod_base = OTHER; note = 2prime Fluoro Nucleotide
  modified_base 10: mod_base = OTHER; note = 2prime Fluoro Nucleotide
  modified_base 11: mod_base = OTHER; note = 2prime Fluoro Nucleotide
ctgtacaagtgctcagttcca

SEQ ID NO: 167 - RNA, 21 nt, synthetic construct
  source 1..21: mol_type = other RNA
  modified_base 1..2: mod_base = OTHER; note = Phosphorothioate Linkage
  modified_base 2..3: mod_base = OTHER; note = Phosphorothioate Linkage
  modified_base 19..20: mod_base = OTHER; note = Phosphorothioate Linkage
  modified_base 20..21: mod_base = OTHER; note = Phosphorothioate Linkage
  modified_base 1: mod_base = OTHER; note = 2prime-O-methyl Nucleotide
  modified_base 2: mod_base = OTHER; note = 2prime-O-methyl Nucleotide
  modified_base 3: mod_base = OTHER; note = 2prime-O-methyl Nucleotide
  modified_base 4: mod_base = OTHER; note = 2prime-O-methyl Nucleotide
  modified_base 5: mod_base = OTHER; note = 2prime-O-methyl Nucleotide
  modified_base 6: mod_base = OTHER; note = 2prime-O-methyl Nucleotide
  modified_base 8: mod_base = OTHER; note = 2prime-O-methyl Nucleotide
  modified_base 12: mod_base = OTHER; note = 2prime-O-methyl Nucleotide
  modified_base 13: mod_base = OTHER; note = 2prime-O-methyl Nucleotide
  modified_base 14: mod_base = OTHER; note = 2prime-O-methyl Nucleotide
  modified_base 15: mod_base = OTHER; note = 2prime-O-methyl Nucleotide
  modified_base 16: mod_base = OTHER; note = 2prime-O-methyl Nucleotide
  modified_base 17: mod_base = OTHER; note = 2prime-O-methyl Nucleotide
  modified_base 18: mod_base = OTHER; note = 2prime-O-methyl Nucleotide
  modified_base 19: mod_base = OTHER; note = 2prime-O-methyl Nucleotide
  modified_base 20: mod_base = OTHER; note = 2prime-O-methyl Nucleotide
  modified_base 21: mod_base = OTHER; note = 2prime-O-methyl Nucleotide
  modified_base 7: mod_base = OTHER; note = 2prime Fluoro Nucleotide
  modified_base 9: mod_base = OTHER; note = 2prime Fluoro Nucleotide
  modified_base 10: mod_base = OTHER; note = 2prime Fluoro Nucleotide
  modified_base 11: mod_base = OTHER; note = 2prime Fluoro Nucleotide
ctgtacaagtgctcagttcca

SEQ ID NO: 168 - RNA, 21 nt, synthetic construct
  source 1..21: mol_type = other RNA
  modified_base 1..2: mod_base = OTHER; note = Phosphorothioate Linkage
  modified_base 2..3: mod_base = OTHER; note = Phosphorothioate Linkage
  modified_base 19..20: mod_base = OTHER; note = Phosphorothioate Linkage
  modified_base 20..21: mod_base = OTHER; note = Phosphorothioate Linkage
  modified_base 1: mod_base = OTHER; note = 2prime-O-methyl Nucleotide
  modified_base 2: mod_base = OTHER; note = 2prime-O-methyl Nucleotide
  modified_base 3: mod_base = OTHER; note = 2prime-O-methyl Nucleotide
  modified_base 4: mod_base = OTHER; note = 2prime-O-methyl Nucleotide
  modified_base 5: mod_base = OTHER; note = 2prime-O-methyl Nucleotide
  modified_base 6: mod_base = OTHER; note = 2prime-O-methyl Nucleotide
  modified_base 7: mod_base = OTHER; note = 2prime-O-methyl Nucleotide
  modified_base 8: mod_base = OTHER; note = 2prime-O-methyl Nucleotide
  modified_base 12: mod_base = OTHER; note = 2prime-O-methyl Nucleotide
  modified_base 13: mod_base = OTHER; note = 2prime-O-methyl Nucleotide
  modified_base 14: mod_base = OTHER; note = 2prime-O-methyl Nucleotide
  modified_base 15: mod_base = OTHER; note = 2prime-O-methyl Nucleotide
  modified_base 16: mod_base = OTHER; note = 2prime-O-methyl Nucleotide
  modified_base 17: mod_base = OTHER; note = 2prime-O-methyl Nucleotide
  modified_base 18: mod_base = OTHER; note = 2prime-O-methyl Nucleotide
  modified_base 19: mod_base = OTHER; note = 2prime-O-methyl Nucleotide
  modified_base 20: mod_base = OTHER; note = 2prime-O-methyl Nucleotide
  modified_base 21: mod_base = OTHER; note = 2prime-O-methyl Nucleotide
  modified_base 9: mod_base = OTHER; note = 2prime Fluoro Nucleotide
  modified_base 10: mod_base = OTHER; note = 2prime Fluoro Nucleotide
  modified_base 11: mod_base = OTHER; note = 2prime Fluoro Nucleotide
ctgtacaagtgctcagttcca

SEQ ID NO: 169 - RNA, 21 nt, synthetic construct
  source 1..21: mol_type = other RNA
  modified_base 1..2: mod_base = OTHER; note = Phosphorothioate Linkage
  modified_base 2..3: mod_base = OTHER; note = Phosphorothioate Linkage
  modified_base 19..20: mod_base = OTHER; note = Phosphorothioate Linkage
  modified_base 20..21: mod_base = OTHER; note = Phosphorothioate Linkage
  modified_base 1: mod_base = OTHER; note = 2prime-O-methyl Nucleotide
  modified_base 2: mod_base = OTHER; note = 2prime-O-methyl Nucleotide
  modified_base 3: mod_base = OTHER; note = 2prime-O-methyl Nucleotide
  modified_base 4: mod_base = OTHER; note = 2prime-O-methyl Nucleotide
  modified_base 5: mod_base = OTHER; note = 2prime-O-methyl Nucleotide
  modified_base 6: mod_base = OTHER; note = 2prime-O-methyl Nucleotide
  modified_base 7: mod_base = OTHER; note = 2prime-O-methyl Nucleotide
  modified_base 8: mod_base = OTHER; note = 2prime-O-methyl Nucleotide
  modified_base 12: mod_base = OTHER; note = 2prime-O-methyl Nucleotide
  modified_base 13: mod_base = OTHER; note = 2prime-O-methyl Nucleotide
  modified_base 14: mod_base = OTHER; note = 2prime-O-methyl Nucleotide
  modified_base 15: mod_base = OTHER; note = 2prime-O-methyl Nucleotide
  modified_base 16: mod_base = OTHER; note = 2prime-O-methyl Nucleotide
  modified_base 17: mod_base = OTHER; note = 2prime-O-methyl Nucleotide
  modified_base 18: mod_base = OTHER; note = 2prime-O-methyl Nucleotide
  modified_base 19: mod_base = OTHER; note = 2prime-O-methyl Nucleotide
  modified_base 20: mod_base = OTHER; note = 2prime-O-methyl Nucleotide
  modified_base 21: mod_base = OTHER; note = 2prime-O-methyl Nucleotide
  modified_base 9: mod_base = OTHER; note = 2prime Fluoro Nucleotide
  modified_base 10: mod_base = OTHER; note = 2prime Fluoro Nucleotide
  modified_base 11: mod_base = OTHER; note = 2prime Fluoro Nucleotide
ctgtacaagtgctcagttcca

SEQ ID NO: 170 - RNA, 21 nt, synthetic construct
  source 1..21: mol_type = other RNA
  modified_base 1..2: mod_base = OTHER; note = Phosphorothioate Linkage
  modified_base 2..3: mod_base = OTHER; note = Phosphorothioate Linkage
  modified_base 19..20: mod_base = OTHER; note = Phosphorothioate Linkage
  modified_base 20..21: mod_base = OTHER; note = Phosphorothioate Linkage
  modified_base 1: mod_base = OTHER; note = 2prime-O-methyl Nucleotide
  modified_base 2: mod_base = OTHER; note = 2prime-O-methyl Nucleotide
  modified_base 3: mod_base = OTHER; note = 2prime-O-methyl Nucleotide
  modified_base 4: mod_base = OTHER; note = 2prime-O-methyl Nucleotide
  modified_base 5: mod_base = OTHER; note = 2prime-O-methyl Nucleotide
  modified_base 6: mod_base = OTHER; note = 2prime-O-methyl Nucleotide
  modified_base 7: mod_base = OTHER; note = 2prime-O-methyl Nucleotide
  modified_base 8: mod_base = OTHER; note = 2prime-O-methyl Nucleotide
  modified_base 12: mod_base = OTHER; note = 2prime-O-methyl Nucleotide
  modified_base 13: mod_base = OTHER; note = 2prime-O-methyl Nucleotide
  modified_base 14: mod_base = OTHER; note = 2prime-O-methyl Nucleotide
  modified_base 15: mod_base = OTHER; note = 2prime-O-methyl Nucleotide
  modified_base 16: mod_base = OTHER; note = 2prime-O-methyl Nucleotide
  modified_base 17: mod_base = OTHER; note = 2prime-O-methyl Nucleotide
  modified_base 18: mod_base = OTHER; note = 2prime-O-methyl Nucleotide
  modified_base 19: mod_base = OTHER; note = 2prime-O-methyl Nucleotide
  modified_base 20: mod_base = OTHER; note = 2prime-O-methyl Nucleotide
  modified_base 21: mod_base = OTHER; note = 2prime-O-methyl Nucleotide
  modified_base 9: mod_base = OTHER; note = 2prime Fluoro Nucleotide
  modified_base 10: mod_base = OTHER; note = 2prime Fluoro Nucleotide
  modified_base 11: mod_base = OTHER; note = 2prime Fluoro Nucleotide
ctgtacaagtgctcagttcca

SEQ ID NO: 171 - RNA, 21 nt, synthetic construct
  source 1..21: mol_type = other RNA
  modified_base 1..2: mod_base = OTHER; note = Phosphorothioate Linkage
  modified_base 2..3: mod_base = OTHER; note = Phosphorothioate Linkage
  modified_base 19..20: mod_base = OTHER; note = Phosphorothioate Linkage
  modified_base 20..21: mod_base = OTHER; note = Phosphorothioate Linkage
  modified_base 1: mod_base = OTHER; note = 2prime-O-methyl Nucleotide
  modified_base 2: mod_base = OTHER; note = 2prime-O-methyl Nucleotide
  modified_base 3: mod_base = OTHER; note = 2prime-O-methyl Nucleotide
  modified_base 4: mod_base = OTHER; note = 2prime-O-methyl Nucleotide
  modified_base 5: mod_base = OTHER; note = 2prime-O-methyl Nucleotide
  modified_base 6: mod_base = OTHER; note = 2prime-O-methyl Nucleotide
  modified_base 7: mod_base = OTHER; note = 2prime-O-methyl Nucleotide
  modified_base 8: mod_base = OTHER; note = 2prime-O-methyl Nucleotide
  modified_base 12: mod_base = OTHER; note = 2prime-O-methyl Nucleotide
  modified_base 13: mod_base = OTHER; note = 2prime-O-methyl Nucleotide
  modified_base 14: mod_base = OTHER; note = 2prime-O-methyl Nucleotide
  modified_base 15: mod_base = OTHER; note = 2prime-O-methyl Nucleotide
  modified_base 16: mod_base = OTHER; note = 2prime-O-methyl Nucleotide
  modified_base 17: mod_base = OTHER; note = 2prime-O-methyl Nucleotide
  modified_base 18: mod_base = OTHER; note = 2prime-O-methyl Nucleotide
  modified_base 19: mod_base = OTHER; note = 2prime-O-methyl Nucleotide
  modified_base 20: mod_base = OTHER; note = 2prime-O-methyl Nucleotide
  modified_base 21: mod_base = OTHER; note = 2prime-O-methyl Nucleotide
  modified_base 9: mod_base = OTHER; note = 2prime Fluoro Nucleotide
  modified_base 10: mod_base = OTHER; note = 2prime Fluoro Nucleotide
  modified_base 11: mod_base = OTHER; note = 2prime Fluoro Nucleotide
ctgtacaagtgctcagttcca

SEQ ID NO: 172 - RNA, 21 nt, synthetic construct
  source 1..21: mol_type = other RNA
  modified_base 1..2: mod_base = OTHER; note = Phosphorothioate Linkage
  modified_base 2..3: mod_base = OTHER; note = Phosphorothioate Linkage
  modified_base 19..20: mod_base = OTHER; note = Phosphorothioate Linkage
  modified_base 20..21: mod_base = OTHER; note = Phosphorothioate Linkage
  modified_base 1: mod_base = OTHER; note = 2prime-O-methyl Nucleotide
  modified_base 2: mod_base = OTHER; note = 2prime-O-methyl Nucleotide
  modified_base 3: mod_base = OTHER; note = 2prime-O-methyl Nucleotide
  modified_base 4: mod_base = OTHER; note = 2prime-O-methyl Nucleotide
  modified_base 5: mod_base = OTHER; note = 2prime-O-methyl Nucleotide
  modified_base 6: mod_base = OTHER; note = 2prime-O-methyl Nucleotide
  modified_base 7: mod_base = OTHER; note = 2prime-O-methyl Nucleotide
  modified_base 8: mod_base = OTHER; note = 2prime-O-methyl Nucleotide
  modified_base 12: mod_base = OTHER; note = 2prime-O-methyl Nucleotide
  modified_base 13: mod_base = OTHER; note = 2prime-O-methyl Nucleotide
  modified_base 14: mod_base = OTHER; note = 2prime-O-methyl Nucleotide
  modified_base 15: mod_base = OTHER; note = 2prime-O-methyl Nucleotide
  modified_base 16: mod_base = OTHER; note = 2prime-O-methyl Nucleotide
  modified_base 17: mod_base = OTHER; note = 2prime-O-methyl Nucleotide
  modified_base 18: mod_base = OTHER; note = 2prime-O-methyl Nucleotide
  modified_base 19: mod_base = OTHER; note = 2prime-O-methyl Nucleotide
  modified_base 20: mod_base = OTHER; note = 2prime-O-methyl Nucleotide
  modified_base 21: mod_base = OTHER; note = 2prime-O-methyl Nucleotide
  modified_base 9: mod_base = OTHER; note = 2prime Fluoro Nucleotide
  modified_base 10: mod_base = OTHER; note = 2prime Fluoro Nucleotide
  modified_base 11: mod_base = OTHER; note = 2prime Fluoro Nucleotide
ctgtacaagtgctcagttcca

SEQ ID NO: 173 - DNA, 21 bp, synthetic construct
  source 1..21: mol_type = other DNA
  modified_base 1..2: mod_base = OTHER; note = Phosphorothioate Linkage
  modified_base 2..3: mod_base = OTHER; note = Phosphorothioate Linkage
  modified_base 19..20: mod_base = OTHER; note = Phosphorothioate Linkage
  modified_base 20..21: mod_base = OTHER; note = Phosphorothioate Linkage
  modified_base 1: mod_base = OTHER; note = 2prime-O-methyl Nucleotide
  modified_base 2: mod_base = OTHER; note = 2prime-O-methyl Nucleotide
  modified_base 3: mod_base = OTHER; note = 2prime-O-methyl Nucleotide
  modified_base 4: mod_base = OTHER; note = 2prime-O-methyl Nucleotide
  modified_base 5: mod_base = OTHER; note = 2prime-O-methyl Nucleotide
  modified_base 6: mod_base = OTHER; note = 2prime-O-methyl Nucleotide
  modified_base 7: mod_base = OTHER; note = 2prime-O-methyl Nucleotide
  modified_base 8: mod_base = OTHER; note = 2prime-O-methyl Nucleotide
  modified_base 12: mod_base = OTHER; note = 2prime-O-methyl Nucleotide
  modified_base 13: mod_base = OTHER; note = 2prime-O-methyl Nucleotide
  modified_base 14: mod_base = OTHER; note = 2prime-O-methyl Nucleotide
  modified_base 15: mod_base = OTHER; note = DNA segment
  modified_base 16: mod_base = OTHER; note = 2prime-O-methyl Nucleotide
  modified_base 17: mod_base = OTHER; note = DNA segment
  modified_base 18: mod_base = OTHER; note = 2prime-O-methyl Nucleotide
  modified_base 19: mod_base = OTHER; note = 2prime-O-methyl Nucleotide
  modified_base 20: mod_base = OTHER; note = 2prime-O-methyl Nucleotide
  modified_base 21: mod_base = OTHER; note = 2prime-O-methyl Nucleotide
  modified_base 9: mod_base = OTHER; note = 2prime Fluoro Nucleotide
  modified_base 10: mod_base = OTHER; note = 2prime Fluoro Nucleotide
  modified_base 11: mod_base = OTHER; note = 2prime Fluoro Nucleotide
  modified_base 1..14: mod_base = OTHER; note = RNA segment
  modified_base 16: mod_base = OTHER; note = RNA segment
  modified_base 18..21: mod_base = OTHER; note = RNA segment
ctgtacaagtgctcagttcca

SEQ ID NO: 174 - RNA, 21 nt, synthetic construct
  source 1..21: mol_type = other RNA
  modified_base 1..2: mod_base = OTHER; note = Phosphorothioate Linkage
  modified_base 2..3: mod_base = OTHER; note = Phosphorothioate Linkage
  modified_base 19..20: mod_base = OTHER; note = Phosphorothioate Linkage
  modified_base 20..21: mod_base = OTHER; note = Phosphorothioate Linkage
  modified_base 1: mod_base = OTHER; note = 2prime-O-methyl Nucleotide
  modified_base 2: mod_base = OTHER; note = 2prime-O-methyl Nucleotide
  modified_base 3: mod_base = OTHER; note = 2prime-O-methyl Nucleotide
  modified_base 4: mod_base = OTHER; note = 2prime-O-methyl Nucleotide
  modified_base 5: mod_base = OTHER; note = 2prime-O-methyl Nucleotide
  modified_base 6: mod_base = OTHER; note = 2prime-O-methyl Nucleotide
  modified_base 7: mod_base = OTHER; note = 2prime-O-methyl Nucleotide
  modified_base 8: mod_base = OTHER; note = 2prime-O-methyl Nucleotide
  modified_base 12: mod_base = OTHER; note = 2prime-O-methyl Nucleotide
  modified_base 13: mod_base = OTHER; note = 2prime-O-methyl Nucleotide
  modified_base 14: mod_base = OTHER; note = 2prime-O-methyl Nucleotide
  modified_base 15: mod_base = OTHER; note = 2prime-O-methyl Nucleotide
  modified_base 16: mod_base = OTHER; note = 2prime-O-methyl Nucleotide
  modified_base 17: mod_base = OTHER; note = 2prime-O-methyl Nucleotide
  modified_base 18: mod_base = OTHER; note = 2prime-O-methyl Nucleotide
  modified_base 19: mod_base = OTHER; note = 2prime-O-methyl Nucleotide
  modified_base 20: mod_base = OTHER; note = 2prime-O-methyl Nucleotide
  modified_base 21: mod_base = OTHER; note = 2prime-O-methyl Nucleotide
  modified_base 9: mod_base = OTHER; note = 2prime Fluoro Nucleotide
  modified_base 10: mod_base = OTHER; note = 2prime Fluoro Nucleotide
  modified_base 11: mod_base = OTHER; note = 2prime Fluoro Nucleotide
ctgtacaagtgctcagttcca

SEQ ID NO: 175 - RNA, 21 nt, synthetic construct
  source 1..21: mol_type = other RNA
  modified_base 1..2: mod_base = OTHER; note = Phosphorothioate Linkage
  modified_base 2..3: mod_base = OTHER; note = Phosphorothioate Linkage
  modified_base 19..20: mod_base = OTHER; note = Phosphorothioate Linkage
  modified_base 20..21: mod_base = OTHER; note = Phosphorothioate Linkage
  modified_base 1: mod_base = OTHER; note = 2prime-O-methyl Nucleotide
  modified_base 2: mod_base = OTHER; note = 2prime-O-methyl Nucleotide
  modified_base 3: mod_base = OTHER; note = 2prime-O-methyl Nucleotide
  modified_base 4: mod_base = OTHER; note = 2prime-O-methyl Nucleotide
  modified_base 5: mod_base = OTHER; note = 2prime-O-methyl Nucleotide
  modified_base 6: mod_base = OTHER; note = 2prime-O-methyl Nucleotide
  modified_base 7: mod_base = OTHER; note = 2prime-O-methyl Nucleotide
  modified_base 8: mod_base = OTHER; note = 2prime-O-methyl Nucleotide
  modified_base 12: mod_base = OTHER; note = 2prime-O-methyl Nucleotide
  modified_base 13: mod_base = OTHER; note = 2prime-O-methyl Nucleotide
  modified_base 14: mod_base = OTHER; note = 2prime-O-methyl Nucleotide
  modified_base 15: mod_base = OTHER; note = 2prime-O-methyl Nucleotide
  modified_base 16: mod_base = OTHER; note = 2prime-O-methyl Nucleotide
  modified_base 17: mod_base = OTHER; note = 2prime-O-methyl Nucleotide
  modified_base 18: mod_base = OTHER; note = 2prime-O-methyl Nucleotide
  modified_base 19: mod_base = OTHER; note = 2prime-O-methyl Nucleotide
  modified_base 20: mod_base = OTHER; note = 2prime-O-methyl Nucleotide
  modified_base 21: mod_base = OTHER; note = 2prime-O-methyl Nucleotide
  modified_base 9: mod_base = OTHER; note = 2prime Fluoro Nucleotide
  modified_base 10: mod_base = OTHER; note = 2prime Fluoro Nucleotide
  modified_base 11: mod_base = OTHER; note = 2prime Fluoro Nucleotide
ctgtacaagtgctcagttcca

SEQ ID NO: 176 - RNA, 23 nt, synthetic construct
  source 1..23: mol_type = other RNA
  modified_base 1: mod_base = OTHER; note = 5prime-vinylphosphonate linked to uracil
  modified_base 1..2: mod_base = OTHER; note = Phosphorothioate Linkage
  modified_base 2..3: mod_base = OTHER; note = Phosphorothioate Linkage
  modified_base 21..22: mod_base = OTHER; note = Phosphorothioate Linkage
  modified_base 22..23: mod_base = OTHER; note = Phosphorothioate Linkage
  modified_base 1: mod_base = OTHER; note = 2prime-O-methyl Nucleotide
  modified_base 3: mod_base = OTHER; note = 2prime-O-methyl Nucleotide
  modified_base 4: mod_base = OTHER; note = 2prime-O-methyl Nucleotide
  modified_base 5: mod_base = OTHER; note = 2prime-O-methyl Nucleotide
  modified_base 7: mod_base = OTHER; note = 2prime-O-methyl Nucleotide
  modified_base 8: mod_base = OTHER; note = 2prime-O-methyl Nucleotide
  modified_base 9: mod_base = OTHER; note = 2prime-O-methyl Nucleotide
  modified_base 10: mod_base = OTHER; note = 2prime-O-methyl Nucleotide
  modified_base 11: mod_base = OTHER; note = 2prime-O-methyl Nucleotide
  modified_base 12: mod_base = OTHER; note = 2prime-O-methyl Nucleotide
  modified_base 13: mod_base = OTHER; note = 2prime-O-methyl Nucleotide
  modified_base 15: mod_base = OTHER; note = 2prime-O-methyl Nucleotide
  modified_base 17: mod_base = OTHER; note = 2prime-O-methyl Nucleotide
  modified_base 18: mod_base = OTHER; note = 2prime-O-methyl Nucleotide
  modified_base 19: mod_base = OTHER; note = 2prime-O-methyl Nucleotide
  modified_base 20: mod_base = OTHER; note = 2prime-O-methyl Nucleotide
  modified_base 21: mod_base = OTHER; note = 2prime-O-methyl Nucleotide
  modified_base 22: mod_base = OTHER; note = 2prime-O-methyl Nucleotide
  modified_base 23: mod_base = OTHER; note = 2prime-O-methyl Nucleotide
  modified_base 2: mod_base = OTHER; note = 2prime Fluoro Nucleotide
  modified_base 6: mod_base = OTHER; note = 2prime Fluoro Nucleotide
  modified_base 14: mod_base = OTHER; note = 2prime Fluoro Nucleotide
  modified_base 16: mod_base = OTHER; note = 2prime Fluoro Nucleotide
ttggaactgagcacttgtacagg

SEQ ID NO: 177 - RNA, 23 nt, synthetic construct
  source 1..23: mol_type = other RNA
  modified_base 1: mod_base = OTHER; note = 5prime-vinylphosphonate linked to uracil
  modified_base 1..2: mod_base = OTHER; note = Phosphorothioate Linkage
  modified_base 2..3: mod_base = OTHER; note = Phosphorothioate Linkage
  modified_base 21..22: mod_base = OTHER; note = Phosphorothioate Linkage
  modified_base 22..23: mod_base = OTHER; note = Phosphorothioate Linkage
  modified_base 1: mod_base = OTHER; note = 2prime-O-methyl Nucleotide
  modified_base 3: mod_base = OTHER; note = 2prime-O-methyl Nucleotide
  modified_base 4: mod_base = OTHER; note = 2prime-O-methyl Nucleotide
  modified_base 5: mod_base = OTHER; note = 2prime-O-methyl Nucleotide
  modified_base 7: mod_base = OTHER; note = 2prime-O-methyl Nucleotide
  modified_base 8: mod_base = OTHER; note = 2prime-O-methyl Nucleotide
  modified_base 9: mod_base = OTHER; note = 2prime-O-methyl Nucleotide
  modified_base 10: mod_base = OTHER; note = 2prime-O-methyl Nucleotide
  modified_base 11: mod_base = OTHER; note = 2prime-O-methyl Nucleotide
  modified_base 12: mod_base = OTHER; note = 2prime-O-methyl Nucleotide
  modified_base 13: mod_base = OTHER; note = 2prime-O-methyl Nucleotide
  modified_base 15: mod_base = OTHER; note = 2prime-O-methyl Nucleotide
  modified_base 17: mod_base = OTHER; note = 2prime-O-methyl Nucleotide
  modified_base 18: mod_base = OTHER; note = 2prime-O-methyl Nucleotide
  modified_base 19: mod_base = OTHER; note = 2prime-O-methyl Nucleotide
  modified_base 20: mod_base = OTHER; note = 2prime-O-methyl Nucleotide
  modified_base 21: mod_base = OTHER; note = 2prime-O-methyl Nucleotide
  modified_base 22: mod_base = OTHER; note = 2prime-O-methyl Nucleotide
  modified_base 23: mod_base = OTHER; note = 2prime-O-methyl Nucleotide
  modified_base 2: mod_base = OTHER; note = 2prime Fluoro Nucleotide
  modified_base 6: mod_base = OTHER; note = 2prime Fluoro Nucleotide
  modified_base 14: mod_base = OTHER; note = 2prime Fluoro Nucleotide
  modified_base 16: mod_base = OTHER; note = 2prime Fluoro Nucleotide
ttggaactgagcacttgtacagg

SEQ ID NO: 178 - RNA, 23 nt, synthetic construct
  source 1..23: mol_type = other RNA
  modified_base 1: mod_base = OTHER; note = 5prime-vinylphosphonate linked to uracil
  modified_base 1..2: mod_base = OTHER; note = Phosphorothioate Linkage
  modified_base 2..3: mod_base = OTHER; note = Phosphorothioate Linkage
  modified_base 21..22: mod_base = OTHER; note = Phosphorothioate Linkage
  modified_base 22..23: mod_base = OTHER; note = Phosphorothioate Linkage
  modified_base 1: mod_base = OTHER; note = 2prime-O-methyl Nucleotide
  modified_base 3: mod_base = OTHER; note = 2prime-O-methyl Nucleotide
  modified_base 4: mod_base = OTHER; note = 2prime-O-methyl Nucleotide
  modified_base 6: mod_base = OTHER; note = 2prime-O-methyl Nucleotide
  modified_base 7: mod_base = OTHER; note = 2prime-O-methyl Nucleotide
  modified_base 9: mod_base = OTHER; note = 2prime-O-methyl Nucleotide
  modified_base 10: mod_base = OTHER; note = 2prime-O-methyl Nucleotide
  modified_base 11: mod_base = OTHER; note = 2prime-O-methyl Nucleotide
  modified_base 12: mod_base = OTHER; note = 2prime-O-methyl Nucleotide
  modified_base 13: mod_base = OTHER; note = 2prime-O-methyl Nucleotide
  modified_base 15: mod_base = OTHER; note = 2prime-O-methyl Nucleotide
  modified_base 17: mod_base = OTHER; note = 2prime-O-methyl Nucleotide
  modified_base 18: mod_base = OTHER; note = 2prime-O-methyl Nucleotide
  modified_base 19: mod_base = OTHER; note = 2prime-O-methyl Nucleotide
  modified_base 20: mod_base = OTHER; note = 2prime-O-methyl Nucleotide
  modified_base 21: mod_base = OTHER; note = 2prime-O-methyl Nucleotide
  modified_base 22: mod_base = OTHER; note = 2prime-O-methyl Nucleotide
  modified_base 23: mod_base = OTHER; note = 2prime-O-methyl Nucleotide
  modified_base 2: mod_base = OTHER; note = 2prime Fluoro Nucleotide
  modified_base 5: mod_base = OTHER; note = 2prime Fluoro Nucleotide
  modified_base 8: mod_base = OTHER; note = 2prime Fluoro Nucleotide
  modified_base 14: mod_base = OTHER; note = 2prime Fluoro Nucleotide
  modified_base 16: mod_base = OTHER; note = 2prime Fluoro Nucleotide
ttggaactgagcacttgtacagg

SEQ ID NO: 179 - RNA, 23 nt, synthetic construct
  source 1..23: mol_type = other RNA
  modified_base 1: mod_base = OTHER; note = 5prime-vinylphosphonate linked to uracil
  modified_base 1..2: mod_base = OTHER; note = Phosphorothioate Linkage
  modified_base 2..3: mod_base = OTHER; note = Phosphorothioate Linkage
  modified_base 21..22: mod_base = OTHER; note = Phosphorothioate Linkage
  modified_base 22..23: mod_base = OTHER; note = Phosphorothioate Linkage
  modified_base 1: mod_base = OTHER; note = 2prime-O-methyl Nucleotide
  modified_base 3: mod_base = OTHER; note = 2prime-O-methyl Nucleotide
  modified_base 4: mod_base = OTHER; note = 2prime-O-methyl Nucleotide
  modified_base 6: mod_base = OTHER; note = 2prime-O-methyl Nucleotide
  modified_base 7: mod_base = OTHER; note = 2prime-O-methyl Nucleotide
  modified_base 9: mod_base = OTHER; note = 2prime-O-methyl Nucleotide
  modified_base 10: mod_base = OTHER; note = 2prime-O-methyl Nucleotide
  modified_base 11: mod_base = OTHER; note = 2prime-O-methyl Nucleotide
  modified_base 12: mod_base = OTHER; note = 2prime-O-methyl Nucleotide
  modified_base 13: mod_base = OTHER; note = 2prime-O-methyl Nucleotide
  modified_base 15: mod_base = OTHER; note = 2prime-O-methyl Nucleotide
  modified_base 17: mod_base = OTHER; note = 2prime-O-methyl Nucleotide
  modified_base 18: mod_base = OTHER; note = 2prime-O-methyl Nucleotide
  modified_base 19: mod_base = OTHER; note = 2prime-O-methyl Nucleotide
  modified_base 20: mod_base = OTHER; note = 2prime-O-methyl Nucleotide
  modified_base 21: mod_base = OTHER; note = 2prime-O-methyl Nucleotide
  modified_base 22: mod_base = OTHER; note = 2prime-O-methyl Nucleotide
  modified_base 23: mod_base = OTHER; note = 2prime-O-methyl Nucleotide
  modified_base 2: mod_base = OTHER; note = 2prime Fluoro Nucleotide
  modified_base 5: mod_base = OTHER; note = 2prime Fluoro Nucleotide
  modified_base 8: mod_base = OTHER; note = 2prime Fluoro Nucleotide
  modified_base 14: mod_base = OTHER; note = 2prime Fluoro Nucleotide
  modified_base 16: mod_base = OTHER; note = 2prime Fluoro Nucleotide
ttggaactgagcacttgtacagg

SEQ ID NO: 180 - RNA, 23 nt, synthetic construct
  source 1..23: mol_type = other RNA
  modified_base 1: mod_base = OTHER; note = 5prime-vinylphosphonate linked to uracil
  modified_base 1..2: mod_base = OTHER; note = Phosphorothioate Linkage
  modified_base 2..3: mod_base = OTHER; note = Phosphorothioate Linkage
  modified_base 21..22: mod_base = OTHER; note = Phosphorothioate Linkage
  modified_base 22..23: mod_base = OTHER; note = Phosphorothioate Linkage
  modified_base 1: mod_base = OTHER; note = 2prime-O-methyl Nucleotide
  modified_base 3: mod_base = OTHER; note = 2prime-O-methyl Nucleotide
  modified_base 4: mod_base = OTHER; note = 2prime-O-methyl Nucleotide
  modified_base 6: mod_base = OTHER; note = 2prime-O-methyl Nucleotide
  modified_base 7: mod_base = OTHER; note = 2prime-O-methyl Nucleotide
  modified_base 9: mod_base = OTHER; note = 2prime-O-methyl Nucleotide
  modified_base 10: mod_base = OTHER; note = 2prime-O-methyl Nucleotide
  modified_base 11: mod_base = OTHER; note = 2prime-O-methyl Nucleotide
  modified_base 12: mod_base = OTHER; note = 2prime-O-methyl Nucleotide
  modified_base 13: mod_base = OTHER; note = 2prime-O-methyl Nucleotide
  modified_base 15: mod_base = OTHER; note = 2prime-O-methyl Nucleotide
  modified_base 17: mod_base = OTHER; note = 2prime-O-methyl Nucleotide
  modified_base 18: mod_base = OTHER; note = 2prime-O-methyl Nucleotide
  modified_base 19: mod_base = OTHER; note = 2prime-O-methyl Nucleotide
  modified_base 20: mod_base = OTHER; note = 2prime-O-methyl Nucleotide
  modified_base 21: mod_base = OTHER; note = 2prime-O-methyl Nucleotide
  modified_base 22: mod_base = OTHER; note = 2prime-O-methyl Nucleotide
  modified_base 23: mod_base = OTHER; note = 2prime-O-methyl Nucleotide
  modified_base 2: mod_base = OTHER; note = 2prime Fluoro Nucleotide
  modified_base 5: mod_base = OTHER; note = 2prime Fluoro Nucleotide
  modified_base 8: mod_base = OTHER; note = 2prime Fluoro Nucleotide
  modified_base 14: mod_base = OTHER; note = 2prime Fluoro Nucleotide
  modified_base 16: mod_base = OTHER; note = 2prime Fluoro Nucleotide
ttggaactgagcacttgtacagg

SEQ ID NO: 181 - RNA, 22 nt, synthetic construct
  source 1..22: mol_type = other RNA
  modified_base 1: mod_base = OTHER; note = 5prime-vinylphosphonate linked to uracil
  modified_base 1..2: mod_base = OTHER; note = Phosphorothioate Linkage
  modified_base 2..3: mod_base = OTHER; note = Phosphorothioate Linkage
  modified_base 20..21: mod_base = OTHER; note = Phosphorothioate Linkage
  modified_base 21..22: mod_base = OTHER; note = Phosphorothioate Linkage
  modified_base 1: mod_base = OTHER; note = 2prime-O-methyl Nucleotide
  modified_base 3: mod_base = OTHER; note = 2prime-O-methyl Nucleotide
  modified_base 4: mod_base = OTHER; note = 2prime-O-methyl Nucleotide
  modified_base 6: mod_base = OTHER; note = 2prime-O-methyl Nucleotide
  modified_base 7: mod_base = OTHER; note = 2prime-O-methyl Nucleotide
  modified_base 9: mod_base = OTHER; note = 2prime-O-methyl Nucleotide
  modified_base 10: mod_base = OTHER; note = 2prime-O-methyl Nucleotide
  modified_base 11: mod_base = OTHER; note = 2prime-O-methyl Nucleotide
  modified_base 12: mod_base = OTHER; note = 2prime-O-methyl Nucleotide
  modified_base 13: mod_base = OTHER; note = 2prime-O-methyl Nucleotide
  modified_base 15: mod_base = OTHER; note = 2prime-O-methyl Nucleotide
  modified_base 17: mod_base = OTHER; note = 2prime-O-methyl Nucleotide
  modified_base 18: mod_base = OTHER; note = 2prime-O-methyl Nucleotide
  modified_base 19: mod_base = OTHER; note = 2prime-O-methyl Nucleotide
  modified_base 20: mod_base = OTHER; note = 2prime-O-methyl Nucleotide
  modified_base 21: mod_base = OTHER; note = 2prime-O-methyl Nucleotide
  modified_base 22: mod_base = OTHER; note = 2prime-O-methyl Nucleotide
  modified_base 2: mod_base = OTHER; note = 2prime Fluoro Nucleotide
  modified_base 5: mod_base = OTHER; note = 2prime Fluoro Nucleotide
  modified_base 8: mod_base = OTHER; note = 2prime Fluoro Nucleotide
  modified_base 14: mod_base = OTHER; note = 2prime Fluoro Nucleotide
  modified_base 16: mod_base = OTHER; note = 2prime Fluoro Nucleotide
ttggaactgagcacttgtacag

SEQ ID NO: 182 - RNA, 23 nt, synthetic construct
  source 1..23: mol_type = other RNA
  modified_base 1: mod_base = OTHER; note = 5prime-vinylphosphonate linked to uracil
  modified_base 1..2: mod_base = OTHER; note = Phosphorothioate Linkage
  modified_base 2..3: mod_base = OTHER; note = Phosphorothioate Linkage
  modified_base 21..22: mod_base = OTHER; note = Phosphorothioate Linkage
  modified_base 22..23: mod_base = OTHER; note = Phosphorothioate Linkage
  modified_base 1: mod_base = OTHER; note = 2prime-O-methyl Nucleotide
  modified_base 3: mod_base = OTHER; note = 2prime-O-methyl Nucleotide
  modified_base 4: mod_base = OTHER; note = 2prime-O-methyl Nucleotide
  modified_base 6: mod_base = OTHER; note = 2prime-O-methyl Nucleotide
  modified_base 7: mod_base = OTHER; note = 2prime-O-methyl Nucleotide
  modified_base 9: mod_base = OTHER; note = 2prime-O-methyl Nucleotide
  modified_base 10: mod_base = OTHER; note = 2prime-O-methyl Nucleotide
  modified_base 11: mod_base = OTHER; note = 2prime-O-methyl Nucleotide
  modified_base 12: mod_base = OTHER; note = 2prime-O-methyl Nucleotide
  modified_base 13: mod_base = OTHER; note = 2prime-O-methyl Nucleotide
  modified_base 15: mod_base = OTHER; note = 2prime-O-methyl Nucleotide
  modified_base 17: mod_base = OTHER; note = 2prime-O-methyl Nucleotide
  modified_base 18: mod_base = OTHER; note = 2prime-O-methyl Nucleotide
  modified_base 19: mod_base = OTHER; note = 2prime-O-methyl Nucleotide
  modified_base 20: mod_base = OTHER; note = 2prime-O-methyl Nucleotide
  modified_base 21: mod_base = OTHER; note = 2prime-O-methyl Nucleotide
  modified_base 22: mod_base = OTHER; note = 2prime-O-methyl Nucleotide
  modified_base 23: mod_base = OTHER; note = 2prime-O-methyl Nucleotide
  modified_base 2: mod_base = OTHER; note = 2prime Fluoro Nucleotide
  modified_base 5: mod_base = OTHER; note = abasic moiety
  modified_base 8: mod_base = OTHER; note = 2prime Fluoro Nucleotide
  modified_base 14: mod_base = OTHER; note = 2prime Fluoro Nucleotide
  modified_base 16: mod_base = OTHER; note = 2prime Fluoro Nucleotide
ttggnactgagcacttgtacagg

SEQ ID NO: 183 - RNA, 23 nt, synthetic construct
  source 1..23: mol_type = other RNA
  modified_base 1: mod_base = OTHER; note = 5prime-vinylphosphonate linked to uracil
  modified_base 1..2: mod_base = OTHER; note = Phosphorothioate Linkage
  modified_base 2..3: mod_base = OTHER; note = Phosphorothioate Linkage
  modified_base 21..22: mod_base = OTHER; note = Phosphorothioate Linkage
  modified_base 22..23: mod_base = OTHER; note = Phosphorothioate Linkage
  modified_base 1: mod_base = OTHER; note = 2prime-O-methyl Nucleotide
  modified_base 3: mod_base = OTHER; note = 2prime-O-methyl Nucleotide
  modified_base 4: mod_base = OTHER; note = 2prime-O-methyl Nucleotide
  modified_base 7: mod_base = OTHER; note = 2prime-O-methyl Nucleotide
  modified_base 9: mod_base = OTHER; note = 2prime-O-methyl Nucleotide
  modified_base 10: mod_base = OTHER; note = 2prime-O-methyl Nucleotide
  modified_base 11: mod_base = OTHER; note = 2prime-O-methyl Nucleotide
  modified_base 12: mod_base = OTHER; note = 2prime-O-methyl Nucleotide
  modified_base 13: mod_base = OTHER; note = 2prime-O-methyl Nucleotide
  modified_base 15: mod_base = OTHER; note = 2prime-O-methyl Nucleotide
  modified_base 17: mod_base = OTHER; note = 2prime-O-methyl Nucleotide
  modified_base 18: mod_base = OTHER; note = 2prime-O-methyl Nucleotide
  modified_base 19: mod_base = OTHER; note = 2prime-O-methyl Nucleotide
  modified_base 20: mod_base = OTHER; note = 2prime-O-methyl Nucleotide
  modified_base 21: mod_base = OTHER; note = 2prime-O-methyl Nucleotide
  modified_base 22: mod_base = OTHER; note = 2prime-O-methyl Nucleotide
  modified_base 23: mod_base = OTHER; note = 2prime-O-methyl Nucleotide
  modified_base 2: mod_base = OTHER; note = 2prime Fluoro Nucleotide
  modified_base 5: mod_base = OTHER; note = 2prime Fluoro Nucleotide
  modified_base 8: mod_base = OTHER; note = 2prime Fluoro Nucleotide
  modified_base 14: mod_base = OTHER; note = 2prime Fluoro Nucleotide
  modified_base 16: mod_base = OTHER; note = 2prime Fluoro Nucleotide
  modified_base 6: mod_base = OTHER; note = abasic moiety
ttgganctgagcacttgtacagg

SEQ ID NO: 184 - RNA, 23 nt, synthetic construct
  source 1..23: mol_type = other RNA
  modified_base 1: mod_base = OTHER; note = 5prime-vinylphosphonate linked to uracil
  modified_base 1..2: mod_base = OTHER; note = Phosphorothioate Linkage
  modified_base 2..3: mod_base = OTHER; note = Phosphorothioate Linkage
  modified_base 21..22: mod_base = OTHER; note = Phosphorothioate Linkage
  modified_base 22..23: mod_base = OTHER; note = Phosphorothioate Linkage
  modified_base 1: mod_base = OTHER; note = 2prime-O-methyl Nucleotide
  modified_base 3: mod_base = OTHER; note = 2prime-O-methyl Nucleotide
  modified_base 4: mod_base = OTHER; note = 2prime-O-methyl Nucleotide
  modified_base 6: mod_base = OTHER; note = 2prime-O-methyl Nucleotide
  modified_base 9: mod_base = OTHER; note = 2prime-O-methyl Nucleotide
  modified_base 10: mod_base = OTHER; note = 2prime-O-methyl Nucleotide
  modified_base 11: mod_base = OTHER; note = 2prime-O-methyl Nucleotide
  modified_base 12: mod_base = OTHER; note = 2prime-O-methyl Nucleotide
  modified_base 13: mod_base = OTHER; note = 2prime-O-methyl Nucleotide
  modified_base 15: mod_base = OTHER; note = 2prime-O-methyl Nucleotide
  modified_base 17: mod_base = OTHER; note = 2prime-O-methyl Nucleotide
  modified_base 18: mod_base = OTHER; note = 2prime-O-methyl Nucleotide
  modified_base 19: mod_base = OTHER; note = 2prime-O-methyl Nucleotide
  modified_base 20: mod_base = OTHER; note = 2prime-O-methyl Nucleotide
  modified_base 21: mod_base = OTHER; note = 2prime-O-methyl Nucleotide
  modified_base 22: mod_base = OTHER; note = 2prime-O-methyl Nucleotide
  modified_base 23: mod_base = OTHER; note = 2prime-O-methyl Nucleotide
  modified_base 2: mod_base = OTHER; note = 2prime Fluoro Nucleotide
  modified_base 5: mod_base = OTHER; note = 2prime Fluoro Nucleotide
  modified_base 8: mod_base = OTHER; note = 2prime Fluoro Nucleotide
  modified_base 14: mod_base = OTHER; note = 2prime Fluoro Nucleotide
  modified_base 16: mod_base = OTHER; note = 2prime Fluoro Nucleotide
  modified_base 7: mod_base = OTHER; note = abasic moiety
ttggaantgagcacttgtacagg

SEQ ID NO: 185 - RNA, 23 nt, synthetic construct
  source 1..23: mol_type = other RNA
  modified_base 1: mod_base = OTHER; note = 5prime-vinylphosphonate linked to uracil
  modified_base 1..2: mod_base = OTHER; note = Phosphorothioate Linkage
  modified_base 2..3: mod_base = OTHER; note = Phosphorothioate Linkage
  modified_base 21..22: mod_base = OTHER; note = Phosphorothioate Linkage
  modified_base 22..23: mod_base = OTHER; note = Phosphorothioate Linkage
  modified_base 1: mod_base = OTHER; note = 2prime-O-methyl Nucleotide
  modified_base 3: mod_base = OTHER; note = 2prime-O-methyl Nucleotide
  modified_base 4: mod_base = OTHER; note = 2prime-O-methyl Nucleotide
  modified_base 6: mod_base = OTHER; note = 2prime-O-methyl Nucleotide
  modified_base 7: mod_base = OTHER; note = 2prime-O-methyl Nucleotide
  modified_base 9: mod_base = OTHER; note = 2prime-O-methyl Nucleotide
  modified_base 10: mod_base = OTHER; note = 2prime-O-methyl Nucleotide
  modified_base 11: mod_base = OTHER; note = 2prime-O-methyl Nucleotide
  modified_base 12: mod_base = OTHER; note = 2prime-O-methyl Nucleotide
  modified_base 13: mod_base = OTHER; note = 2prime-O-methyl Nucleotide
  modified_base 15: mod_base = OTHER; note = 2prime-O-methyl Nucleotide
  modified_base 17: mod_base = OTHER; note = 2prime-O-methyl Nucleotide
  modified_base 18: mod_base = OTHER; note = 2prime-O-methyl Nucleotide
  modified_base 19: mod_base = OTHER; note = 2prime-O-methyl Nucleotide
  modified_base 20: mod_base = OTHER; note = 2prime-O-methyl Nucleotide
  modified_base 21: mod_base = OTHER; note = 2prime-O-methyl Nucleotide
  modified_base 22: mod_base = OTHER; note = 2prime-O-methyl Nucleotide
  modified_base 23: mod_base = OTHER; note = 2prime-O-methyl Nucleotide
  modified_base 2: mod_base = OTHER; note = 2prime Fluoro Nucleotide
  modified_base 5: mod_base = OTHER; note = 2prime Fluoro Nucleotide
  modified_base 14: mod_base = OTHER; note = 2prime Fluoro Nucleotide
  modified_base 16: mod_base = OTHER; note = 2prime Fluoro Nucleotide
  modified_base 8: mod_base = OTHER; note = abasic moiety
ttggaacngagcacttgtacagg

SEQ ID NO: 186 - RNA, 23 nt, synthetic construct
  source 1..23: mol_type = other RNA
  modified_base 1: mod_base = OTHER; note = 5prime-vinylphosphonate linked to uracil
  modified_base 1..2: mod_base = OTHER; note = Phosphorothioate Linkage
  modified_base 2..3: mod_base = OTHER; note = Phosphorothioate Linkage
  modified_base 21..22: mod_base = OTHER; note = Phosphorothioate Linkage
  modified_base 22..23: mod_base = OTHER; note = Phosphorothioate Linkage
  modified_base 1: mod_base = OTHER; note = 2prime-O-methyl Nucleotide
  modified_base 3: mod_base = OTHER; note = 2prime-O-methyl Nucleotide
  modified_base 4: mod_base = OTHER; note = 2prime-O-methyl Nucleotide
  modified_base 6: mod_base = OTHER; note = 2prime-O-methyl Nucleotide
  modified_base 7: mod_base = OTHER; note = 2prime-O-methyl Nucleotide
  modified_base 9: mod_base = OTHER; note = 2prime-O-methyl Nucleotide
  modified_base 10: mod_base = OTHER; note = 2prime-O-methyl Nucleotide
  modified_base 11: mod_base = OTHER; note = 2prime-O-methyl Nucleotide
  modified_base 12: mod_base = OTHER; note = 2prime-O-methyl Nucleotide
  modified_base 13: mod_base = OTHER; note = 2prime-O-methyl Nucleotide
  modified_base 15: mod_base = OTHER; note = 2prime-O-methyl Nucleotide
  modified_base 17: mod_base = OTHER; note = 2prime-O-methyl Nucleotide
  modified_base 18: mod_base = OTHER; note = 2prime-O-methyl Nucleotide
  modified_base 19: mod_base = OTHER; note = 2prime-O-methyl Nucleotide
  modified_base 20: mod_base = OTHER; note = 2prime-O-methyl Nucleotide
  modified_base 21: mod_base = OTHER; note = 2prime-O-methyl Nucleotide
  modified_base 22: mod_base = OTHER; note = 2prime-O-methyl Nucleotide
  modified_base 23: mod_base = OTHER; note = 2prime-O-methyl Nucleotide
  modified_base 2: mod_base = OTHER; note = 2prime Fluoro Nucleotide
  modified_base 8: mod_base = OTHER; note = 2prime Fluoro Nucleotide
  modified_base 14: mod_base = OTHER; note = 2prime Fluoro Nucleotide
  modified_base 16: mod_base = OTHER; note = 2prime Fluoro Nucleotide
  modified_base 5: mod_base = OTHER; note = abasic moiety
ttggnactgagcacttgtacagg

SEQ ID NO: 187 - RNA, 23 nt, synthetic construct
  source 1..23: mol_type = other RNA
  modified_base 1: mod_base = OTHER; note = 5prime-vinylphosphonate linked to uracil
  modified_base 1..2: mod_base = OTHER; note = Phosphorothioate Linkage
  modified_base 2..3: mod_base = OTHER; note = Phosphorothioate Linkage
  modified_base 21..22: mod_base = OTHER; note = Phosphorothioate Linkage
  modified_base 22..23: mod_base = OTHER; note = Phosphorothioate Linkage
  modified_base 1: mod_base = OTHER; note = 2prime-O-methyl Nucleotide
  modified_base 3: mod_base = OTHER; note = 2prime-O-methyl Nucleotide
  modified_base 4: mod_base = OTHER; note = 2prime-O-methyl Nucleotide
  modified_base 7: mod_base = OTHER; note = 2prime-O-methyl Nucleotide
  modified_base 9: mod_base = OTHER; note = 2prime-O-methyl Nucleotide
  modified_base 10: mod_base = OTHER; note = 2prime-O-methyl Nucleotide
  modified_base 11: mod_base = OTHER; note = 2prime-O-methyl Nucleotide
  modified_base 12: mod_base = OTHER; note = 2prime-O-methyl Nucleotide
  modified_base 13: mod_base = OTHER; note = 2prime-O-methyl Nucleotide
  modified_base 15: mod_base = OTHER; note = 2prime-O-methyl Nucleotide
  modified_base 17: mod_base = OTHER; note = 2prime-O-methyl Nucleotide
  modified_base 18: mod_base = OTHER; note = 2prime-O-methyl Nucleotide
  modified_base 19: mod_base = OTHER; note = 2prime-O-methyl Nucleotide
  modified_base 20: mod_base = OTHER; note = 2prime-O-methyl Nucleotide
  modified_base 21: mod_base = OTHER; note = 2prime-O-methyl Nucleotide
  modified_base 22: mod_base = OTHER; note = 2prime-O-methyl Nucleotide
  modified_base 23: mod_base = OTHER; note = 2prime-O-methyl Nucleotide
  modified_base 2: mod_base = OTHER; note = 2prime Fluoro Nucleotide
  modified_base 5: mod_base = OTHER; note = 2prime Fluoro Nucleotide
  modified_base 8: mod_base = OTHER; note = 2prime Fluoro Nucleotide
  modified_base 14: mod_base = OTHER; note = 2prime Fluoro Nucleotide
  modified_base 16: mod_base = OTHER; note = 2prime Fluoro Nucleotide
  modified_base 6: mod_base = OTHER; note = abasic moiety
ttgganctgagcacttgtacagg

SEQ ID NO: 188 - RNA, 23 nt, synthetic construct
  source 1..23: mol_type = other RNA
  modified_base 1: mod_base = OTHER; note = 5prime-vinylphosphonate linked to uracil
  modified_base 1..2: mod_base = OTHER; note = Phosphorothioate Linkage
  modified_base 2..3: mod_base = OTHER; note = Phosphorothioate Linkage
  modified_base 21..22: mod_base = OTHER; note = Phosphorothioate Linkage
  modified_base 22..23: mod_base = OTHER; note = Phosphorothioate Linkage
  modified_base 1: mod_base = OTHER; note = 2prime-O-methyl Nucleotide
  modified_base 3: mod_base = OTHER; note = 2prime-O-methyl Nucleotide
  modified_base 4: mod_base = OTHER; note = 2prime-O-methyl Nucleotide
  modified_base 6: mod_base = OTHER; note = 2prime-O-methyl Nucleotide
  modified_base 9: mod_base = OTHER; note = 2prime-O-methyl Nucleotide
  modified_base 10: mod_base = OTHER; note = 2prime-O-methyl Nucleotide
  modified_base 11: mod_base = OTHER; note = 2prime-O-methyl Nucleotide
  modified_base 12: mod_base = OTHER; note = 2prime-O-methyl Nucleotide
  modified_base 13: mod_base = OTHER; note = 2prime-O-methyl Nucleotide
  modified_base 15: mod_base = OTHER; note = 2prime-O-methyl Nucleotide
  modified_base 17: mod_base = OTHER; note = 2prime-O-methyl Nucleotide
  modified_base 18: mod_base = OTHER; note = 2prime-O-methyl Nucleotide
  modified_base 19: mod_base = OTHER; note = 2prime-O-methyl Nucleotide
  modified_base 20: mod_base = OTHER; note = 2prime-O-methyl Nucleotide
  modified_base 21: mod_base = OTHER; note = 2prime-O-methyl Nucleotide
  modified_base 22: mod_base = OTHER; note = 2prime-O-methyl Nucleotide
  modified_base 23: mod_base = OTHER; note = 2prime-O-methyl Nucleotide
  modified_base 2: mod_base = OTHER; note = 2prime Fluoro Nucleotide
  modified_base 5: mod_base = OTHER; note = 2prime Fluoro Nucleotide
  modified_base 8: mod_base = OTHER; note = 2prime Fluoro Nucleotide
  modified_base 14: mod_base = OTHER; note = 2prime Fluoro Nucleotide
  modified_base 16: mod_base = OTHER; note = 2prime Fluoro Nucleotide
  modified_base 7: mod_base = OTHER; note = abasic moiety
ttggaantgagcacttgtacagg

SEQ ID NO: 189 - RNA, 23 nt, synthetic construct
  source 1..23: mol_type = other RNA
  modified_base 1: mod_base = OTHER; note = 5prime-vinylphosphonate linked to uracil
  modified_base 1..2: mod_base = OTHER; note = Phosphorothioate Linkage
  modified_base 2..3: mod_base = OTHER; note = Phosphorothioate Linkage
  modified_base 21..22: mod_base = OTHER; note = Phosphorothioate Linkage
  modified_base 22..23: mod_base = OTHER; note = Phosphorothioate Linkage
  modified_base 1: mod_base = OTHER; note = 2prime-O-methyl Nucleotide
  modified_base 3: mod_base = OTHER; note = 2prime-O-methyl Nucleotide
  modified_base 4: mod_base = OTHER; note = 2prime-O-methyl Nucleotide
  modified_base 6: mod_base = OTHER; note = 2prime-O-methyl Nucleotide
  modified_base 7: mod_base = OTHER; note = 2prime-O-methyl Nucleotide
  modified_base 9: mod_base = OTHER; note = 2prime-O-methyl Nucleotide
  modified_base 10: mod_base = OTHER; note = 2prime-O-methyl Nucleotide
  modified_base 11: mod_base = OTHER; note = 2prime-O-methyl Nucleotide
  modified_base 12: mod_base = OTHER; note = 2prime-O-methyl Nucleotide
  modified_base 13: mod_base = OTHER; note = 2prime-O-methyl Nucleotide
  modified_base 15: mod_base = OTHER; note = 2prime-O-methyl Nucleotide
  modified_base 17: mod_base = OTHER; note = 2prime-O-methyl Nucleotide
  modified_base 18: mod_base = OTHER; note = 2prime-O-methyl Nucleotide
  modified_base 19: mod_base = OTHER; note = 2prime-O-methyl Nucleotide
  modified_base 20: mod_base = OTHER; note = 2prime-O-methyl Nucleotide
  modified_base 21: mod_base = OTHER; note = 2prime-O-methyl Nucleotide
  modified_base 22: mod_base = OTHER; note = 2prime-O-methyl Nucleotide
  modified_base 23: mod_base = OTHER; note = 2prime-O-methyl Nucleotide
  modified_base 2: mod_base = OTHER; note = 2prime Fluoro Nucleotide
  modified_base 5: mod_base = OTHER; note = 2prime Fluoro Nucleotide
  modified_base 14: mod_base = OTHER; note = 2prime Fluoro Nucleotide
  modified_base 16: mod_base = OTHER; note = 2prime Fluoro Nucleotide
  modified_base 8: mod_base = OTHER; note = abasic moiety
ttggaacngagcacttgtacagg

SEQ ID NO: 190 - RNA, 23 nt, synthetic construct
  source 1..23: mol_type = other RNA
  modified_base 1: mod_base = OTHER; note = 5prime-vinylphosphonate linked to uracil
  modified_base 1..2: mod_base = OTHER; note = Phosphorothioate Linkage
  modified_base 2..3: mod_base = OTHER; note = Phosphorothioate Linkage
  modified_base 21..22: mod_base = OTHER; note = Phosphorothioate Linkage
  modified_base 22..23: mod_base = OTHER; note = Phosphorothioate Linkage
  modified_base 1: mod_base = OTHER; note = 2prime-O-methyl Nucleotide
  modified_base 3: mod_base = OTHER; note = 2prime-O-methyl Nucleotide
  modified_base 4: mod_base = OTHER; note = 2prime-O-methyl Nucleotide
  modified_base 5: mod_base = OTHER; note = 2prime-O-methyl Nucleotide
  modified_base 7: mod_base = OTHER; note = 2prime-O-methyl Nucleotide
  modified_base 8: mod_base = OTHER; note = 2prime-O-methyl Nucleotide
  modified_base 9: mod_base = OTHER; note = 2prime-O-methyl Nucleotide
  modified_base 10: mod_base = OTHER; note = 2prime-O-methyl Nucleotide
  modified_base 11: mod_base = OTHER; note = 2prime-O-methyl Nucleotide
  modified_base 12: mod_base = OTHER; note = 2prime-O-methyl Nucleotide
  modified_base 13: mod_base = OTHER; note = 2prime-O-methyl Nucleotide
  modified_base 15: mod_base = OTHER; note = 2prime-O-methyl Nucleotide
  modified_base 17: mod_base = OTHER; note = 2prime-O-methyl Nucleotide
  modified_base 18: mod_base = OTHER; note = 2prime-O-methyl Nucleotide
  modified_base 19: mod_base = OTHER; note = 2prime-O-methyl Nucleotide
  modified_base 20: mod_base = OTHER; note = 2prime-O-methyl Nucleotide
  modified_base 21: mod_base = OTHER; note = 2prime-O-methyl Nucleotide
  modified_base 22: mod_base = OTHER; note = 2prime-O-methyl Nucleotide
  modified_base 23: mod_base = OTHER; note = 2prime-O-methyl Nucleotide
  modified_base 2: mod_base = OTHER; note = 2prime Fluoro Nucleotide
  modified_base 6: mod_base = OTHER; note = 2prime Fluoro Nucleotide
  modified_base 14: mod_base = OTHER; note = 2prime Fluoro Nucleotide
  modified_base 16: mod_base = OTHER; note = 2prime Fluoro Nucleotide
tggaactgagcacttgtacagga

SEQ ID NO: 191 - RNA, 23 nt, synthetic construct
  source 1..23: mol_type = other RNA
  modified_base 1: mod_base = OTHER; note = 5prime-vinylphosphonate linked to uracil
  modified_base 1..2: mod_base = OTHER; note = Phosphorothioate Linkage
  modified_base 2..3: mod_base = OTHER; note = Phosphorothioate Linkage
  modified_base 21..22: mod_base = OTHER; note = Phosphorothioate Linkage
  modified_base 22..23: mod_base = OTHER; note = Phosphorothioate Linkage
  modified_base 1: mod_base = OTHER; note = 2prime-O-methyl Nucleotide
  modified_base 3: mod_base = OTHER; note = 2prime-O-methyl Nucleotide
  modified_base 4: mod_base = OTHER; note = 2prime-O-methyl Nucleotide
  modified_base 5: mod_base = OTHER; note = 2prime-O-methyl Nucleotide
  modified_base 7: mod_base = OTHER; note = 2prime-O-methyl Nucleotide
  modified_base 8: mod_base = OTHER; note = 2prime-O-methyl Nucleotide
  modified_base 9: mod_base = OTHER; note = 2prime-O-methyl Nucleotide
  modified_base 10: mod_base = OTHER; note = 2prime-O-methyl Nucleotide
  modified_base 11: mod_base = OTHER; note = 2prime-O-methyl Nucleotide
  modified_base 12: mod_base = OTHER; note = 2prime-O-methyl Nucleotide
  modified_base 13: mod_base = OTHER; note = 2prime-O-methyl Nucleotide
  modified_base 15: mod_base = OTHER; note = 2prime-O-methyl Nucleotide
  modified_base 17: mod_base = OTHER; note = 2prime-O-methyl Nucleotide
  modified_base 18: mod_base = OTHER; note = 2prime-O-methyl Nucleotide
  modified_base 19: mod_base = OTHER; note = 2prime-O-methyl Nucleotide
  modified_base 20: mod_base = OTHER; note = 2prime-O-methyl Nucleotide
  modified_base 21: mod_base = OTHER; note = 2prime-O-methyl Nucleotide
  modified_base 22: mod_base = OTHER; note = 2prime-O-methyl Nucleotide
  modified_base 23: mod_base = OTHER; note = 2prime-O-methyl Nucleotide
  modified_base 2: mod_base = OTHER; note = 2prime Fluoro Nucleotide
  modified_base 6: mod_base = OTHER; note = 2prime Fluoro Nucleotide
  modified_base 14: mod_base = OTHER; note = 2prime Fluoro Nucleotide
  modified_base 16: mod_base = OTHER; note = 2prime Fluoro Nucleotide
tggaactgagcacttgtacagga

SEQ ID NO: 192 - RNA, 23 nt, synthetic construct
  source 1..23: mol_type = other RNA
  modified_base 1: mod_base = OTHER; note = 5prime-vinylphosphonate linked to uracil
  modified_base 1..2: mod_base = OTHER; note = Phosphorothioate Linkage
  modified_base 2..3: mod_base = OTHER; note = Phosphorothioate Linkage
  modified_base 21..22: mod_base = OTHER; note = Phosphorothioate Linkage
  modified_base 22..23: mod_base = OTHER; note = Phosphorothioate Linkage
  modified_base 1: mod_base = OTHER; note = 2prime-O-methyl Nucleotide
  modified_base 3: mod_base = OTHER; note = 2prime-O-methyl Nucleotide
  modified_base 4: mod_base = OTHER; note = 2prime-O-methyl Nucleotide
  modified_base 6: mod_base = OTHER; note = 2prime-O-methyl Nucleotide
  modified_base 7: mod_base = OTHER; note = 2prime-O-methyl Nucleotide
  modified_base 9: mod_base = OTHER; note = 2prime-O-methyl Nucleotide
  modified_base 10: mod_base = OTHER; note = 2prime-O-methyl Nucleotide
  modified_base 11: mod_base = OTHER; note = 2prime-O-methyl Nucleotide
  modified_base 12: mod_base = OTHER; note = 2prime-O-methyl Nucleotide
  modified_base 13: mod_base = OTHER; note = 2prime-O-methyl Nucleotide
  modified_base 15: mod_base = OTHER; note = 2prime-O-methyl Nucleotide
  modified_base 17: mod_base = OTHER; note = 2prime-O-methyl Nucleotide
  modified_base 18: mod_base = OTHER; note = 2prime-O-methyl Nucleotide
  modified_base 19: mod_base = OTHER; note = 2prime-O-methyl Nucleotide
  modified_base 20: mod_base = OTHER; note = 2prime-O-methyl Nucleotide
  modified_base 21: mod_base = OTHER; note = 2prime-O-methyl Nucleotide
  modified_base 22: mod_base = OTHER; note = 2prime-O-methyl Nucleotide
  modified_base 23: mod_base = OTHER; note = 2prime-O-methyl Nucleotide
  modified_base 2: mod_base = OTHER; note = 2prime Fluoro Nucleotide
  modified_base 5: mod_base = OTHER; note = 2prime Fluoro Nucleotide
  modified_base 8: mod_base = OTHER; note = 2prime Fluoro Nucleotide
  modified_base 14: mod_base = OTHER; note = 2prime Fluoro Nucleotide
  modified_base 16: mod_base = OTHER; note = 2prime Fluoro Nucleotide
tggaactgagcacttgtacagga

SEQ ID NO: 193 - RNA, 23 nt, synthetic construct
  source 1..23: mol_type = other RNA
  modified_base 1: mod_base = OTHER; note = 5prime-vinylphosphonate linked to uracil
  modified_base 1..2: mod_base = OTHER; note = Phosphorothioate Linkage
  modified_base 2..3: mod_base = OTHER; note = Phosphorothioate Linkage
  modified_base 21..22: mod_base = OTHER; note = Phosphorothioate Linkage
  modified_base 22..23: mod_base = OTHER; note = Phosphorothioate Linkage
  modified_base 1: mod_base = OTHER; note = 2prime-O-methyl Nucleotide
  modified_base 3: mod_base = OTHER; note = 2prime-O-methyl Nucleotide
  modified_base 4: mod_base = OTHER; note = 2prime-O-methyl Nucleotide
  modified_base 6: mod_base = OTHER; note = 2prime-O-methyl Nucleotide
  modified_base 8: mod_base = OTHER; note = 2prime-O-methyl Nucleotide
  modified_base 9: mod_base = OTHER; note = 2prime-O-methyl Nucleotide
  modified_base 10: mod_base = OTHER; note = 2prime-O-methyl Nucleotide
  modified_base 11: mod_base = OTHER; note = 2prime-O-methyl Nucleotide
  modified_base 12: mod_base = OTHER; note = 2prime-O-methyl Nucleotide
  modified_base 13: mod_base = OTHER; note = 2prime-O-methyl Nucleotide
  modified_base 15: mod_base = OTHER; note = 2prime-O-methyl Nucleotide
  modified_base 17: mod_base = OTHER; note = 2prime-O-methyl Nucleotide
  modified_base 18: mod_base = OTHER; note = 2prime-O-methyl Nucleotide
  modified_base 19: mod_base = OTHER; note = 2prime-O-methyl Nucleotide
  modified_base 20: mod_base = OTHER; note = 2prime-O-methyl Nucleotide
  modified_base 21: mod_base = OTHER; note = 2prime-O-methyl Nucleotide
  modified_base 22: mod_base = OTHER; note = 2prime-O-methyl Nucleotide
  modified_base 23: mod_base = OTHER; note = 2prime-O-methyl Nucleotide
  modified_base 2: mod_base = OTHER; note = 2prime Fluoro Nucleotide
  modified_base 5: mod_base = OTHER; note = 2prime Fluoro Nucleotide
  modified_base 7: mod_base = OTHER; note = 2prime Fluoro Nucleotide
  modified_base 14: mod_base = OTHER; note = 2prime Fluoro Nucleotide
  modified_base 16: mod_base = OTHER; note = 2prime Fluoro Nucleotide
tggaactgagcacttgtacagga

SEQ ID NO: 194 - RNA, 23 nt, synthetic construct
  source 1..23: mol_type = other RNA
  modified_base 1: mod_base = OTHER; note = 5prime-vinylphosphonate linked to uracil
  modified_base 1..2: mod_base = OTHER; note = Phosphorothioate Linkage
  modified_base 2..3: mod_base = OTHER; note = Phosphorothioate Linkage
  modified_base 21..22: mod_base = OTHER; note = Phosphorothioate Linkage
  modified_base 22..23: mod_base = OTHER; note = Phosphorothioate Linkage
  modified_base 1: mod_base = OTHER; note = 2prime-O-methyl Nucleotide
  modified_base 3: mod_base = OTHER; note = 2prime-O-methyl Nucleotide
  modified_base 4: mod_base = OTHER; note = 2prime-O-methyl Nucleotide
  modified_base 6: mod_base = OTHER; note = 2prime-O-methyl Nucleotide
  modified_base 7: mod_base = OTHER; note = 2prime-O-methyl Nucleotide
  modified_base 9: mod_base = OTHER; note = 2prime-O-methyl Nucleotide
  modified_base 10: mod_base = OTHER; note = 2prime-O-methyl Nucleotide
  modified_base 11: mod_base = OTHER; note = 2prime-O-methyl Nucleotide
  modified_base 12: mod_base = OTHER; note = 2prime-O-methyl Nucleotide
  modified_base 13: mod_base = OTHER; note = 2prime-O-methyl Nucleotide
  modified_base 15: mod_base = OTHER; note = 2prime-O-methyl Nucleotide
  modified_base 17: mod_base = OTHER; note = 2prime-O-methyl Nucleotide
  modified_base 18: mod_base = OTHER; note = 2prime-O-methyl Nucleotide
  modified_base 19: mod_base = OTHER; note = 2prime-O-methyl Nucleotide
  modified_base 20: mod_base = OTHER; note = 2prime-O-methyl Nucleotide
  modified_base 21: mod_base = OTHER; note = 2prime-O-methyl Nucleotide
  modified_base 22: mod_base = OTHER; note = 2prime-O-methyl Nucleotide
  modified_base 23: mod_base = OTHER; note = 2prime-O-methyl Nucleotide
  modified_base 2: mod_base = OTHER; note = 2prime Fluoro Nucleotide
  modified_base 5: mod_base = OTHER; note = 2prime Fluoro Nucleotide
  modified_base 8: mod_base = OTHER; note = 2prime Fluoro Nucleotide
  modified_base 14: mod_base = OTHER; note = 2prime Fluoro Nucleotide
  modified_base 16: mod_base = OTHER; note = 2prime Fluoro Nucleotide
tggaactgagcacttgtacagga

SEQ ID NO: 195 - RNA, 23 nt, synthetic construct
  source 1..23: mol_type = other RNA
  modified_base 1: mod_base = OTHER; note = 5prime-vinylphosphonate linked to uracil
  modified_base 1..2: mod_base = OTHER; note = Phosphorothioate Linkage
  modified_base 2..3: mod_base = OTHER; note = Phosphorothioate Linkage
  modified_base 21..22: mod_base = OTHER; note = Phosphorothioate Linkage
  modified_base 22..23: mod_base = OTHER; note = Phosphorothioate Linkage
  modified_base 1: mod_base = OTHER; note = 2prime-O-methyl Nucleotide
  modified_base 3: mod_base = OTHER; note = 2prime-O-methyl Nucleotide
  modified_base 4: mod_base = OTHER; note = 2prime-O-methyl Nucleotide
  modified_base 6: mod_base = OTHER; note = 2prime-O-methyl Nucleotide
  modified_base 7: mod_base = OTHER; note = 2prime-O-methyl Nucleotide
  modified_base 9: mod_base = OTHER; note = 2prime-O-methyl Nucleotide
  modified_base 10: mod_base = OTHER; note = 2prime-O-methyl Nucleotide
  modified_base 11: mod_base = OTHER; note = 2prime-O-methyl Nucleotide
  modified_base 12: mod_base = OTHER; note = 2prime-O-methyl Nucleotide
  modified_base 13: mod_base = OTHER; note = 2prime-O-methyl Nucleotide
  modified_base 15: mod_base = OTHER; note = 2prime-O-methyl Nucleotide
  modified_base 17: mod_base = OTHER; note = 2prime-O-methyl Nucleotide
  modified_base 18: mod_base = OTHER; note = 2prime-O-methyl Nucleotide
  modified_base 19: mod_base = OTHER; note = 2prime-O-methyl Nucleotide
  modified_base 20: mod_base = OTHER; note = 2prime-O-methyl Nucleotide
  modified_base 21: mod_base = OTHER; note = 2prime-O-methyl Nucleotide
  modified_base 22: mod_base = OTHER; note = 2prime-O-methyl Nucleotide
  modified_base 23: mod_base = OTHER; note = 2prime-O-methyl Nucleotide
  modified_base 2: mod_base = OTHER; note = 2prime Fluoro Nucleotide
  modified_base 5: mod_base = OTHER; note = 2prime Fluoro Nucleotide
  modified_base 8: mod_base = OTHER; note = 2prime Fluoro Nucleotide
  modified_base 14: mod_base = OTHER; note = 2prime Fluoro Nucleotide
  modified_base 16: mod_base = OTHER; note = 2prime Fluoro Nucleotide
tggaactgagcacttgtacagga

SEQ ID NO: 196 - RNA, 23 nt, synthetic construct
  source 1..23: mol_type = other RNA
  modified_base 1: mod_base = OTHER; note = 5prime-vinylphosphonate linked to uracil
  modified_base 1..2: mod_base = OTHER; note = Phosphorothioate Linkage
  modified_base 2..3: mod_base = OTHER; note = Phosphorothioate Linkage
  modified_base 21..22: mod_base = OTHER; note = Phosphorothioate Linkage
  modified_base 22..23: mod_base = OTHER; note = Phosphorothioate Linkage
  modified_base 1: mod_base = OTHER; note = 2prime-O-methyl Nucleotide
  modified_base 3: mod_base = OTHER; note = 2prime-O-methyl Nucleotide
  modified_base 4: mod_base = OTHER; note = 2prime-O-methyl Nucleotide
  modified_base 5: mod_base = OTHER; note = 2prime-O-methyl Nucleotide
  modified_base 6: mod_base = OTHER; note = 2prime-O-methyl Nucleotide
  modified_base 7: mod_base = OTHER; note = 2prime-O-methyl Nucleotide
  modified_base 8: mod_base = OTHER; note = 2prime-O-methyl Nucleotide
  modified_base 9: mod_base = OTHER; note = 2prime-O-methyl Nucleotide
  modified_base 10: mod_base = OTHER; note = 2prime-O-methyl Nucleotide
  modified_base 11: mod_base = OTHER; note = 2prime-O-methyl Nucleotide
  modified_base 12: mod_base = OTHER; note = 2prime-O-methyl Nucleotide
  modified_base 13: mod_base = OTHER; note = 2prime-O-methyl Nucleotide
  modified_base 15: mod_base = OTHER; note = 2prime-O-methyl Nucleotide
  modified_base 17: mod_base = OTHER; note = 2prime-O-methyl Nucleotide
  modified_base 18: mod_base = OTHER; note = 2prime-O-methyl Nucleotide
  modified_base 19: mod_base = OTHER; note = 2prime-O-methyl Nucleotide
  modified_base 20: mod_base = OTHER; note = 2prime-O-methyl Nucleotide
  modified_base 21: mod_base = OTHER; note = 2prime-O-methyl Nucleotide
  modified_base 22: mod_base = OTHER; note = 2prime-O-methyl Nucleotide
  modified_base 23: mod_base = OTHER; note = 2prime-O-methyl Nucleotide
  modified_base 2: mod_base = OTHER; note = 2prime Fluoro Nucleotide
  modified_base 14: mod_base = OTHER; note = 2prime Fluoro Nucleotide
  modified_base 16: mod_base = OTHER; note = 2prime Fluoro Nucleotide
tggaactgagcacttgtacagga

SEQ ID NO: 197 - DNA, 23 bp, synthetic construct
  source 1..23: mol_type = other DNA
  modified_base 1: mod_base = OTHER; note = 5prime-vinylphosphonate linked to uracil
  modified_base 1..2: mod_base = OTHER; note = Phosphorothioate Linkage
  modified_base 2..3: mod_base = OTHER; note = Phosphorothioate Linkage
  modified_base 21..22: mod_base = OTHER; note = Phosphorothioate Linkage
  modified_base 22..23: mod_base = OTHER; note = Phosphorothioate Linkage
  modified_base 1: mod_base = OTHER; note = 2prime-O-methyl Nucleotide
  modified_base 3: mod_base = OTHER; note = 2prime-O-methyl Nucleotide
  modified_base 6: mod_base = OTHER; note = 2prime-O-methyl Nucleotide
  modified_base 9: mod_base = OTHER; note = 2prime-O-methyl Nucleotide
  modified_base 10: mod_base = OTHER; note = 2prime-O-methyl Nucleotide
  modified_base 11: mod_base = OTHER; note = 2prime-O-methyl Nucleotide
  modified_base 12: mod_base = OTHER; note = 2prime-O-methyl Nucleotide
  modified_base 13: mod_base = OTHER; note = 2prime-O-methyl Nucleotide
  modified_base 15: mod_base = OTHER; note = 2prime-O-methyl Nucleotide
  modified_base 17: mod_base = OTHER; note = 2prime-O-methyl Nucleotide
  modified_base 18: mod_base = OTHER; note = 2prime-O-methyl Nucleotide
  modified_base 19: mod_base = OTHER; note = 2prime-O-methyl Nucleotide
  modified_base 20: mod_base = OTHER; note = 2prime-O-methyl Nucleotide
  modified_base 21: mod_base = OTHER; note = 2prime-O-methyl Nucleotide
  modified_base 22: mod_base = OTHER; note = 2prime-O-methyl Nucleotide
  modified_base 23: mod_base = OTHER; note = 2prime-O-methyl Nucleotide
  modified_base 2: mod_base = OTHER; note = 2prime Fluoro Nucleotide
  modified_base 5: mod_base = OTHER; note = 2prime Fluoro Nucleotide
  modified_base 8: mod_base = OTHER; note = 2prime Fluoro Nucleotide
  modified_base 14: mod_base = OTHER; note = 2prime Fluoro Nucleotide
  modified_base 16: mod_base = OTHER; note = 2prime Fluoro Nucleotide
  modified_base 4: mod_base = OTHER; note = DNA segment
  modified_base 7: mod_base = OTHER; note = DNA segment
  modified_base 1..3: mod_base = OTHER; note = RNA segment
  modified_base 5..6: mod_base = OTHER; note = RNA segment
  modified_base 8..23: mod_base = OTHER; note = RNA segment
tggaactgagcacttgtacagga

SEQ ID NO: 198 - RNA, 23 nt, synthetic construct
  source 1..23: mol_type = other RNA
  modified_base 1: mod_base = OTHER; note = 5prime-vinylphosphonate linked to uracil
  modified_base 1..2: mod_base = OTHER; note = Phosphorothioate Linkage
  modified_base 2..3: mod_base = OTHER; note = Phosphorothioate Linkage
  modified_base 6..7: mod_base = OTHER; note = Phosphorothioate Linkage
  modified_base 21..22: mod_base = OTHER; note = Phosphorothioate Linkage
  modified_base 22..23: mod_base = OTHER; note = Phosphorothioate Linkage
  modified_base 1: mod_base = OTHER; note = 2prime-O-methyl Nucleotide
  modified_base 3: mod_base = OTHER; note = 2prime-O-methyl Nucleotide
  modified_base 4: mod_base = OTHER; note = 2prime-O-methyl Nucleotide
  modified_base 6: mod_base = OTHER; note = 2prime-O-methyl Nucleotide
  modified_base 7: mod_base = OTHER; note = 2prime-O-methyl Nucleotide
  modified_base 9: mod_base = OTHER; note = 2prime-O-methyl Nucleotide
  modified_base 10: mod_base = OTHER; note = 2prime-O-methyl Nucleotide
  modified_base 11: mod_base = OTHER; note = 2prime-O-methyl Nucleotide
  modified_base 12: mod_base = OTHER; note = 2prime-O-methyl Nucleotide
  modified_base 13: mod_base = OTHER; note = 2prime-O-methyl Nucleotide
  modified_base 15: mod_base = OTHER; note = 2prime-O-methyl Nucleotide
  modified_base 17: mod_base = OTHER; note = 2prime-O-methyl Nucleotide
  modified_base 18: mod_base = OTHER; note = 2prime-O-methyl Nucleotide
  modified_base 19: mod_base = OTHER; note = 2prime-O-methyl Nucleotide
  modified_base 20: mod_base = OTHER; note = 2prime-O-methyl Nucleotide
  modified_base 21: mod_base = OTHER; note = 2prime-O-methyl Nucleotide
  modified_base 22: mod_base = OTHER; note = 2prime-O-methyl Nucleotide
  modified_base 23: mod_base = OTHER; note = 2prime-O-methyl Nucleotide
  modified_base 2: mod_base = OTHER; note = 2prime Fluoro Nucleotide
  modified_base 5: mod_base = OTHER; note = 2prime Fluoro Nucleotide
  modified_base 8: mod_base = OTHER; note = 2prime Fluoro Nucleotide
  modified_base 14: mod_base = OTHER; note = 2prime Fluoro Nucleotide
  modified_base 16: mod_base = OTHER; note = 2prime Fluoro Nucleotide
tggaactgagcacttgtacagga

SEQ ID NO: 199 - RNA, 23 nt, synthetic construct
  source 1..23: mol_type = other RNA
  modified_base 1: mod_base = OTHER; note = 5prime-vinylphosphonate linked to uracil
  modified_base 1..2: mod_base = OTHER; note = Phosphorothioate Linkage
  modified_base 2..3: mod_base = OTHER; note = Phosphorothioate Linkage
  modified_base 5..6: mod_base = OTHER; note = Phosphorothioate Linkage
  modified_base 21..22: mod_base = OTHER; note = Phosphorothioate Linkage
  modified_base 22..23: mod_base = OTHER; note = Phosphorothioate Linkage
  modified_base 1: mod_base = OTHER; note = 2prime-O-methyl Nucleotide
  modified_base 3: mod_base = OTHER; note = 2prime-O-methyl Nucleotide
  modified_base 4: mod_base = OTHER; note = 2prime-O-methyl Nucleotide
  modified_base 6: mod_base = OTHER; note = 2prime-O-methyl Nucleotide
  modified_base 7: mod_base = OTHER; note = 2prime-O-methyl Nucleotide
  modified_base 9: mod_base = OTHER; note = 2prime-O-methyl Nucleotide
  modified_base 10: mod_base = OTHER; note = 2prime-O-methyl Nucleotide
  modified_base 11: mod_base = OTHER; note = 2prime-O-methyl Nucleotide
  modified_base 12: mod_base = OTHER; note = 2prime-O-methyl Nucleotide
  modified_base 13: mod_base = OTHER; note = 2prime-O-methyl Nucleotide
  modified_base 15: mod_base = OTHER; note = 2prime-O-methyl Nucleotide
  modified_base 17: mod_base = OTHER; note = 2prime-O-methyl Nucleotide
  modified_base 18: mod_base = OTHER; note = 2prime-O-methyl Nucleotide
  modified_base 19: mod_base = OTHER; note = 2prime-O-methyl Nucleotide
  modified_base 20: mod_base = OTHER; note = 2prime-O-methyl Nucleotide
  modified_base 21: mod_base = OTHER; note = 2prime-O-methyl Nucleotide
  modified_base 22: mod_base = OTHER; note = 2prime-O-methyl Nucleotide
  modified_base 23: mod_base = OTHER; note = 2prime-O-methyl Nucleotide
  modified_base 2: mod_base = OTHER; note = 2prime Fluoro Nucleotide
  modified_base 5: mod_base = OTHER; note = 2prime Fluoro Nucleotide
  modified_base 8: mod_base = OTHER; note = 2prime Fluoro Nucleotide
  modified_base 14: mod_base = OTHER; note = 2prime Fluoro Nucleotide
  modified_base 16: mod_base = OTHER; note = 2prime Fluoro Nucleotide
tggaactgagcacttgtacagga
